United States Patent Application Publication US 2026/0226170 A1, published August 6, 2026 (application 19/652,533).

The application's sequence listing, which the Patent Office published only in electronic form, follows.

SEQUENCE LISTING (1192 sequences)

SEQ ID NO: 1 - protein, 5 aa, synthetic construct
TYYIH

SEQ ID NO: 2 - protein, 17 aa, synthetic construct
WFFPGSGNIKYNEKFKG

SEQ ID NO: 3 - protein, 10 aa, synthetic construct
SYYSYDVLDY

SEQ ID NO: 4 - protein, 11 aa, synthetic construct
KASQNVGINVV

SEQ ID NO: 5 - protein, 7 aa, synthetic construct
SSSHRYS

SEQ ID NO: 6 - protein, 9 aa, synthetic construct
QQFKSYPLT

SEQ ID NO: 7 - protein, 5 aa, synthetic construct
LTYIH

SEQ ID NO: 8 - protein, 17 aa, synthetic construct
RVSAGSGNVKYNEKFKG

SEQ ID NO: 9 - protein, 11 aa, synthetic construct
KASQNVADRVV

SEQ ID NO: 10 - protein, 7 aa, synthetic construct
SSSHRYK

SEQ ID NO: 11 - protein, 5 aa, synthetic construct
NFGMH

SEQ ID NO: 12 - protein, 17 aa, synthetic construct
YISSGSSTIYYADTLKG

SEQ ID NO: 13 - protein, 8 aa, synthetic construct
RGEGAMDY

SEQ ID NO: 14 - protein, 10 aa, synthetic construct
RASSSVNYIY

SEQ ID NO: 15 - protein, 7 aa, synthetic construct
YTSNLAP

SEQ ID NO: 16 - protein, 9 aa, synthetic construct
QQFTSSPFT

SEQ ID NO: 17 - protein, 8 aa, synthetic construct
GYSFTTYY

SEQ ID NO: 18 - protein, 8 aa, synthetic construct
FFPGSGNI

SEQ ID NO: 19 - protein, 12 aa, synthetic construct
AGSYYSYDVLDY

SEQ ID NO: 20 - protein, 6 aa, synthetic construct
QNVGIN

SEQ ID NO: 21 - skipped

SEQ ID NO: 22 - protein, 9 aa, synthetic construct
QQFKSYPLT

SEQ ID NO: 23 - protein, 8 aa, synthetic construct
GYSFRLTY

SEQ ID NO: 24 - protein, 8 aa, synthetic construct
GHDFRLTY

SEQ ID NO: 25 - protein, 8 aa, synthetic construct
VSAGSGNV

SEQ ID NO: 26 - protein, 12 aa, synthetic construct
AVSYYSYDVLDY

SEQ ID NO: 27 - protein, 6 aa, synthetic construct
QNVADR

SEQ ID NO: 28 - protein, 8 aa, synthetic construct
GFTFSNFG

SEQ ID NO: 29 - protein, 8 aa, synthetic construct
ISSGSSTI

SEQ ID NO: 30 - protein, 10 aa, synthetic construct
ARRGEGAMDY

SEQ ID NO: 31 - protein, 5 aa, synthetic construct
SSVNY

SEQ ID NO: 32 - skipped

SEQ ID NO: 33 - protein, 9 aa, synthetic construct
QQFTSSPFT

SEQ ID NO: 34 - protein, 119 aa, synthetic construct
QVQLVQSGAEVKKPGSSVKVSCKASGYSFTTYYIHWVRQAPGQGLEWMGWFFPGSGNIKYNEKFKGRVTITADTSTSTAYMELSSLRSEDTAVYYCAGSYYSYDVLDYWGQGTTVTVSS

SEQ ID NO: 35 - protein, 107 aa, synthetic construct
DIQMTQSPSFLSASVGDRVTITCKASQNVGINVVWHQQKPGKAPKALIYSSSHRYSGVPSRFSGSGSGTEFTLTISSLQPEDFATYFCQQFKSYPLTFGQGTKLEIK

SEQ ID NO: 36 - protein, 119 aa, synthetic construct
QVQLVQSGAEVKKPGASVKVSCKASGYSFTTYYIHWVRQAPGQGLEWMGWFFPGSGNIKYNEKFKGRVTITADTSTSTAYMELSSLRSEDTAVYYCAGSYYSYDVLDYWGQGTLVTVSS

SEQ ID NO: 37 - protein, 119 aa, synthetic construct
QVQLVQSGAEVKKPGSSVKVSCKASGYSFRLTYIHWVRQAPGQGLEWMGWFFPGSGNIKYNEKFKGRVTITADTSTSTAYMELSSLRSEDTAVYYCAGSYYSYDVLDYWGQGTTVTVSS

SEQ ID NO: 38 - protein, 119 aa, synthetic construct
QVQLVQSGAEVKKPGSSVKVSCKASGHDFRLTYIHWVRQAPGQGLEWMGRVSAGSGNVKYNEKFKGRVTITADTSTSTAYMELSSLRSEDTAVYYCAVSYYSYDVLDYWGQGTTVTVSS

SEQ ID NO: 39 - protein, 107 aa, synthetic construct
DIQMTQSPSFLSASVGDRVTITCKASQNVADRVVWHQQKPGKAPKALIYSSSHRYKGVPSRFSGSGSGTEFTLTISSLQPEDFATYFCQQFKSYPLTFGQGTKLEIK

SEQ ID NO: 40 - protein, 117 aa, synthetic construct
EVQLVESGGGLVQPGGSLRLSCAASGFTFSNFGMHWVRQAPGKGLEWVSYISSGSSTIYYADTLKGRFTISRDNSKNTLYLQMNSLRAEDTAVYYCARRGEGAMDYWGQGTTVTVSS

SEQ ID NO: 41 - protein, 106 aa, synthetic construct
DNQLTQSPSFLSASVGDRVTITCRASSSVNYIYWYQQKPGKAPKLLIYYTSNLAPGVPSRFSGSGSGNEYTLTISSLQPEDFATYYCQQFTSSPFTFGQGTKLEIK

SEQ ID NO: 42 - protein, 117 aa, synthetic construct
EVQLVESGGGLVQPGGSLRLSCAASGFTFSNFGMHWVRQAPGKGLEWVSYISSGSSTIYYADTLKGRFTISRDNSKNTLYLQMNSLRAEDTAVYYCARRGEGAMDYWGQGTLVTVSS

SEQ ID NO: 43 - protein, 241 aa, synthetic construct
QVQLVQSGAEVKKPGSSVKVSCKASGYSFTTYYIHWVRQAPGQGLEWMGWFFPGSGNIKYNEKFKGRVTITADTSTSTAYMELSSLRSEDTAVYYCAGSYYSYDVLDYWGQGTTVTVSSGGGGSGGGGSGGGGSDIQMTQSPSFLSASVGDRVTITCKASQNVGINVVWHQQKPGKAPKALIYSSSHRYSGVPSRFSGSGSGTEFTLTISSLQPEDFATYFCQQFKSYPLTFGQGTKLEIK

SEQ ID NO: 44 - protein, 241 aa, synthetic construct
DIQMTQSPSFLSASVGDRVTITCKASQNVGINVVWHQQKPGKAPKALIYSSSHRYSGVPSRFSGSGSGTEFTLTISSLQPEDFATYFCQQFKSYPLTFGQGTKLEIKGGGGSGGGGSGGGGSQVQLVQSGAEVKKPGSSVKVSCKASGYSFTTYYIHWVRQAPGQGLEWMGWFFPGSGNIKYNEKFKGRVTITADTSTSTAYMELSSLRSEDTAVYYCAGSYYSYDVLDYWGQGTTVTVSS

SEQ ID NO: 45 - protein, 241 aa, synthetic construct
QVQLVQSGAEVKKPGSSVKVSCKASGYSFTTYYIHWVRQAPGQCLEWMGWFFPGSGNIKYNEKFKGRVTITADTSTSTAYMELSSLRSEDTAVYYCAGSYYSYDVLDYWGQGTTVTVSSGGGGSGGGGSGGGGSDIQMTQSPSFLSASVGDRVTITCKASQNVGINVVWHQQKPGKAPKALIYSSSHRYSGVPSRFSGSGSGTEFTLTISSLQPEDFATYFCQQFKSYPLTFGCGTKLEIK

SEQ ID NO: 46 - protein, 241 aa, synthetic construct
DIQMTQSPSFLSASVGDRVTITCKASQNVGINVVWHQQKPGKAPKALIYSSSHRYSGVPSRFSGSGSGTEFTLTISSLQPEDFATYFCQQFKSYPLTFGCGTKLEIKGGGGSGGGGSGGGGSQVQLVQSGAEVKKPGSSVKVSCKASGYSFTTYYIHWVRQAPGQCLEWMGWFFPGSGNIKYNEKFKGRVTITADTSTSTAYMELSSLRSEDTAVYYCAGSYYSYDVLDYWGQGTTVTVSS

SEQ ID NO: 47 - protein, 241 aa, synthetic construct
QVQLVQSGAEVKKPGSSVKVSCKASGYSFTTYYIHWVRQAPGQGLEWMGWFFPGSGNIKYNEKFKGRVTITADTSTSTAYMELSSLRSEDTAVYYCAGSYYSYDVCDYWGQGTTVTVSSGGGGSGGGGSGGGGSDIQMTQSPSFLSASVGDRVTITCKASQNVGINVVWHQQKPGKAPKALICSSSHRYSGVPSRFSGSGSGTEFTLTISSLQPEDFATYFCQQFKSYPLTFGQGTKLEIK

SEQ ID NO: 48 - protein, 241 aa, synthetic construct
DIQMTQSPSFLSASVGDRVTITCKASQNVGINVVWHQQKPGKAPKALICSSSHRYSGVPSRFSGSGSGTEFTLTISSLQPEDFATYFCQQFKSYPLTFGQGTKLEIKGGGGSGGGGSGGGGSQVQLVQSGAEVKKPGSSVKVSCKASGYSFTTYYIHWVRQAPGQGLEWMGWFFPGSGNIKYNEKFKGRVTITADTSTSTAYMELSSLRSEDTAVYYCAGSYYSYDVCDYWGQGTTVTVSS

SEQ ID NO: 49 - protein, 241 aa, synthetic construct
QVQLVQSGAEVKKPGSSVKVSCKASGYSFTTYYIHWVRQAPGQGLEWMGWFFPGSGNIKYNEKFKGRVTITADTSTSTAYMELSSLRSEDTAVYYCAGSYYSYCVLDYWGQGTTVTVSSGGGGSGGGGSGGGGSDIQMTQSPSFLSASVGDRVTITCKASQNVGINVVWHQQKPGKAPKALIYCSSHRYSGVPSRFSGSGSGTEFTLTISSLQPEDFATYFCQQFKSYPLTFGQGTKLEIK

SEQ ID NO: 50 - protein, 241 aa, synthetic construct
DIQMTQSPSFLSASVGDRVTITCKASQNVGINVVWHQQKPGKAPKALIYCSSHRYSGVPSRFSGSGSGTEFTLTISSLQPEDFATYFCQQFKSYPLTFGQGTKLEIKGGGGSGGGGSGGGGSQVQLVQSGAEVKKPGSSVKVSCKASGYSFTTYYIHWVRQAPGQGLEWMGWFFPGSGNIKYNEKFKGRVTITADTSTSTAYMELSSLRSEDTAVYYCAGSYYSYCVLDYWGQGTTVTVSS

SEQ ID NO: 51 - protein, 241 aa, synthetic construct
QVQLVQSGAEVKKPGSSVKVSCKASGYSFTTYYIHWVRQAPGQGLEWMGWFFPGSGNIKYNEKFKGRVTITADTSTSTAYMELSSLRSEDTAVYYCAGSYYSYDVLDYWGCGTTVTVSSGGGGSGGGGSGGGGSDIQMTQSPSFLSASVGDRVTITCKASQNVGINVVWHQQKPGKCPKALIYSSSHRYSGVPSRFSGSGSGTEFTLTISSLQPEDFATYFCQQFKSYPLTFGQGTKLEIK

SEQ ID NO: 52 - protein, 241 aa, synthetic construct
DIQMTQSPSFLSASVGDRVTITCKASQNVGINVVWHQQKPGKCPKALIYSSSHRYSGVPSRFSGSGSGTEFTLTISSLQPEDFATYFCQQFKSYPLTFGQGTKLEIKGGGGSGGGGSGGGGSQVQLVQSGAEVKKPGSSVKVSCKASGYSFTTYYIHWVRQAPGQGLEWMGWFFPGSGNIKYNEKFKGRVTITADTSTSTAYMELSSLRSEDTAVYYCAGSYYSYDVLDYWGCGTTVTVSS

SEQ ID NO: 53 - protein, 241 aa, synthetic construct
QVQLVQSGAEVKKPGSSVKVSCKASGYSFTTYYIHWVRQAPGQGLEWMGWFFPGSGNIKYNEKFKGRVTITADTSTSTAYMELSSLRSEDTAVYYCAGSYYSYDVLCYWGQGTTVTVSSGGGGSGGGGSGGGGSDIQMTQSPSFLSASVGDRVTITCKASQNVGINVVWHQQKPGKAPKCLIYSSSHRYSGVPSRFSGSGSGTEFTLTISSLQPEDFATYFCQQFKSYPLTFGQGTKLEIK

SEQ ID NO: 54 - protein, 241 aa, synthetic construct
DIQMTQSPSFLSASVGDRVTITCKASQNVGINVVWHQQKPGKAPKCLIYSSSHRYSGVPSRFSGSGSGTEFTLTISSLQPEDFATYFCQQFKSYPLTFGQGTKLEIKGGGGSGGGGSGGGGSQVQLVQSGAEVKKPGSSVKVSCKASGYSFTTYYIHWVRQAPGQGLEWMGWFFPGSGNIKYNEKFKGRVTITADTSTSTAYMELSSLRSEDTAVYYCAGSYYSYDVLCYWGQGTTVTVSS

SEQ ID NO: 55 - protein, 241 aa, synthetic construct
QVQLVQSGAEVKKPGASVKVSCKASGYSFTTYYIHWVRQAPGQGLEWMGWFFPGSGNIKYNEKFKGRVTITADTSTSTAYMELSSLRSEDTAVYYCAGSYYSYDVLDYWGQGTLVTVSSGGGGSGGGGSGGGGSDIQMTQSPSFLSASVGDRVTITCKASQNVGINVVWHQQKPGKAPKALIYSSSHRYSGVPSRFSGSGSGTEFTLTISSLQPEDFATYFCQQFKSYPLTFGQGTKLEIK

SEQ ID NO: 56 - protein, 241 aa, synthetic construct
QVQLVQSGAEVKKPGASVKVSCKASGYSFTTYYIHWVRQAPGQCLEWMGWFFPGSGNIKYNEKFKGRVTITADTSTSTAYMELSSLRSEDTAVYYCAGSYYSYDVLDYWGQGTLVTVSSGGGGSGGGGSGGGGSDIQMTQSPSFLSASVGDRVTITCKASQNVGINVVWHQQKPGKAPKALIYSSSHRYSGVPSRFSGSGSGTEFTLTISSLQPEDFATYFCQQFKSYPLTFGCGTKLEIK

SEQ ID NO: 57 - protein, 241 aa, synthetic construct
QVQLVQSGAEVKKPGSSVKVSCKASGYSFRLTYIHWVRQAPGQGLEWMGWFFPGSGNIKYNEKFKGRVTITADTSTSTAYMELSSLRSEDTAVYYCAGSYYSYDVLDYWGQGTTVTVSSGGGGSGGGGSGGGGSDIQMTQSPSFLSASVGDRVTITCKASQNVGINVVWHQQKPGKAPKALIYSSSHRYSGVPSRFSGSGSGTEFTLTISSLQPEDFATYFCQQFKSYPLTFGQGTKLEIK

SEQ ID NO: 58 - protein, 241 aa, synthetic construct
DIQMTQSPSFLSASVGDRVTITCKASQNVGINVVWHQQKPGKAPKALIYSSSHRYSGVPSRFSGSGSGTEFTLTISSLQPEDFATYFCQQFKSYPLTFGQGTKLEIKGGGGSGGGGSGGGGSQVQLVQSGAEVKKPGSSVKVSCKASGYSFRLTYIHWVRQAPGQGLEWMGWFFPGSGNIKYNEKFKGRVTITADTSTSTAYMELSSLRSEDTAVYYCAGSYYSYDVLDYWGQGTTVTVSS

SEQ ID NO: 59 - protein, 241 aa, synthetic construct
QVQLVQSGAEVKKPGSSVKVSCKASGYSFRLTYIHWVRQAPGQCLEWMGWFFPGSGNIKYNEKFKGRVTITADTSTSTAYMELSSLRSEDTAVYYCAGSYYSYDVLDYWGQGTTVTVSSGGGGSGGGGSGGGGSDIQMTQSPSFLSASVGDRVTITCKASQNVGINVVWHQQKPGKAPKALIYSSSHRYSGVPSRFSGSGSGTEFTLTISSLQPEDFATYFCQQFKSYPLTFGCGTKLEIK

SEQ ID NO: 60 - protein, 241 aa, synthetic construct
DIQMTQSPSFLSASVGDRVTITCKASQNVGINVVWHQQKPGKAPKALIYSSSHRYSGVPSRFSGSGSGTEFTLTISSLQPEDFATYFCQQFKSYPLTFGCGTKLEIKGGGGSGGGGSGGGGSQVQLVQSGAEVKKPGSSVKVSCKASGYSFRLTYIHWVRQAPGQCLEWMGWFFPGSGNIKYNEKFKGRVTITADTSTSTAYMELSSLRSEDTAVYYCAGSYYSYDVLDYWGQGTTVTVSS

SEQ ID NO: 61 - protein, 241 aa, synthetic construct
QVQLVQSGAEVKKPGSSVKVSCKASGYSFRLTYIHWVRQAPGQGLEWMGWFFPGSGNIKYNEKFKGRVTITADTSTSTAYMELSSLRSEDTAVYYCAGSYYSYDVCDYWGQGTTVTVSSGGGGSGGGGSGGGGSDIQMTQSPSFLSASVGDRVTITCKASQNVGINVVWHQQKPGKAPKALICSSSHRYSGVPSRFSGSGSGTEFTLTISSLQPEDFATYFCQQFKSYPLTFGQGTKLEIK

SEQ ID NO: 62 - protein, 241 aa, synthetic construct
DIQMTQSPSFLSASVGDRVTITCKASQNVGINVVWHQQKPGKAPKALICSSSHRYSGVPSRFSGSGSGTEFTLTISSLQPEDFATYFCQQFKSYPLTFGQGTKLEIKGGGGSGGGGSGGGGSQVQLVQSGAEVKKPGSSVKVSCKASGYSFRLTYIHWVRQAPGQGLEWMGWFFPGSGNIKYNEKFKGRVTITADTSTSTAYMELSSLRSEDTAVYYCAGSYYSYDVCDYWGQGTTVTVSS

SEQ ID NO: 63 - protein, 241 aa, synthetic construct
QVQLVQSGAEVKKPGSSVKVSCKASGYSFRLTYIHWVRQAPGQGLEWMGWFFPGSGNIKYNEKFKGRVTITADTSTSTAYMELSSLRSEDTAVYYCAGSYYSYCVLDYWGQGTTVTVSSGGGGSGGGGSGGGGSDIQMTQSPSFLSASVGDRVTITCKASQNVGINVVWHQQKPGKAPKALIYCSSHRYSGVPSRFSGSGSGTEFTLTISSLQPEDFATYFCQQFKSYPLTFGQGTKLEIK

SEQ ID NO: 64 - protein, 241 aa, synthetic construct
DIQMTQSPSFLSASVGDRVTITCKASQNVGINVVWHQQKPGKAPKALIYCSSHRYSGVPSRFSGSGSGTEFTLTISSLQPEDFATYFCQQFKSYPLTFGQGTKLEIKGGGGSGGGGSGGGGSQVQLVQSGAEVKKPGSSVKVSCKASGYSFRLTYIHWVRQAPGQGLEWMGWFFPGSGNIKYNEKFKGRVTITADTSTSTAYMELSSLRSEDTAVYYCAGSYYSYCVLDYWGQGTTVTVSS

SEQ ID NO: 65 - protein, 241 aa, synthetic construct
QVQLVQSGAEVKKPGSSVKVSCKASGYSFRLTYIHWVRQAPGQGLEWMGWFFPGSGNIKYNEKFKGRVTITADTSTSTAYMELSSLRSEDTAVYYCAGSYYSYDVLDYWGCGTTVTVSSGGGGSGGGGSGGGGSDIQMTQSPSFLSASVGDRVTITCKASQNVGINVVWHQQKPGKCPKALIYSSSHRYSGVPSRFSGSGSGTEFTLTISSLQPEDFATYFCQQFKSYPLTFGQGTKLEIK

SEQ ID NO: 66 - protein, 241 aa, synthetic construct
DIQMTQSPSFLSASVGDRVTITCKASQNVGINVVWHQQKPGKCPKALIYSSSHRYSGVPSRFSGSGSGTEFTLTISSLQPEDFATYFCQQFKSYPLTFGQGTKLEIKGGGGSGGGGSGGGGSQVQLVQSGAEVKKPGSSVKVSCKASGYSFRLTYIHWVRQAPGQGLEWMGWFFPGSGNIKYNEKFKGRVTITADTSTSTAYMELSSLRSEDTAVYYCAGSYYSYDVLDYWGCGTTVTVSS

SEQ ID NO: 67 - protein, 241 aa, synthetic construct
QVQLVQSGAEVKKPGSSVKVSCKASGYSFRLTYIHWVRQAPGQGLEWMGWFFPGSGNIKYNEKFKGRVTITADTSTSTAYMELSSLRSEDTAVYYCAGSYYSYDVLCYWGQGTTVTVSSGGGGSGGGGSGGGGSDIQMTQSPSFLSASVGDRVTITCKASQNVGINVVWHQQKPGKAPKCLIYSSSHRYSGVPSRFSGSGSGTEFTLTISSLQPEDFATYFCQQFKSYPLTFGQGTKLEIK

SEQ ID NO: 68 - protein, 241 aa, synthetic construct
DIQMTQSPSFLSASVGDRVTITCKASQNVGINVVWHQQKPGKAPKCLIYSSSHRYSGVPSRFSGSGSGTEFTLTISSLQPEDFATYFCQQFKSYPLTFGQGTKLEIKGGGGSGGGGSGGGGSQVQLVQSGAEVKKPGSSVKVSCKASGYSFRLTYIHWVRQAPGQGLEWMGWFFPGSGNIKYNEKFKGRVTITADTSTSTAYMELSSLRSEDTAVYYCAGSYYSYDVLCYWGQGTTVTVSS

SEQ ID NO: 69 - protein, 241 aa, synthetic construct
QVQLVQSGAEVKKPGSSVKVSCKASGHDFRLTYIHWVRQAPGQGLEWMGRVSAGSGNVKYNEKFKGRVTITADTSTSTAYMELSSLRSEDTAVYYCAVSYYSYDVLDYWGQGTTVTVSSGGGGSGGGGSGGGGSDIQMTQSPSFLSASVGDRVTITCKASQNVGINVVWHQQKPGKAPKALIYSSSHRYSGVPSRFSGSGSGTEFTLTISSLQPEDFATYFCQQFKSYPLTFGQGTKLEIK

SEQ ID NO: 70 - protein, 241 aa, synthetic construct
DIQMTQSPSFLSASVGDRVTITCKASQNVGINVVWHQQKPGKAPKALIYSSSHRYSGVPSRFSGSGSGTEFTLTISSLQPEDFATYFCQQFKSYPLTFGQGTKLEIKGGGGSGGGGSGGGGSQVQLVQSGAEVKKPGSSVKVSCKASGHDFRLTYIHWVRQAPGQGLEWMGRVSAGSGNVKYNEKFKGRVTITADTSTSTAYMELSSLRSEDTAVYYCAVSYYSYDVLDYWGQGTTVTVSS

SEQ ID NO: 71 - protein, 241 aa, synthetic construct
QVQLVQSGAEVKKPGSSVKVSCKASGHDFRLTYIHWVRQAPGQCLEWMGRVSAGSGNVKYNEKFKGRVTITADTSTSTAYMELSSLRSEDTAVYYCAVSYYSYDVLDYWGQGTTVTVSSGGGGSGGGGSGGGGSDIQMTQSPSFLSASVGDRVTITCKASQNVGINVVWHQQKPGKAPKALIYSSSHRYSGVPSRFSGSGSGTEFTLTISSLQPEDFATYFCQQFKSYPLTFGCGTKLEIK

SEQ ID NO: 72 - protein, 241 aa, synthetic construct
DIQMTQSPSFLSASVGDRVTITCKASQNVGINVVWHQQKPGKAPKALIYSSSHRYSGVPSRFSGSGSGTEFTLTISSLQPEDFATYFCQQFKSYPLTFGCGTKLEIKGGGGSGGGGSGGGGSQVQLVQSGAEVKKPGSSVKVSCKASGHDFRLTYIHWVRQAPGQCLEWMGRVSAGSGNVKYNEKFKGRVTITADTSTSTAYMELSSLRSEDTAVYYCAVSYYSYDVLDYWGQGTTVTVSS

SEQ ID NO: 73 - protein, 241 aa, synthetic construct
QVQLVQSGAEVKKPGSSVKVSCKASGHDFRLTYIHWVRQAPGQGLEWMGRVSAGSGNVKYNEKFKGRVTITADTSTSTAYMELSSLRSEDTAVYYCAVSYYSYDVCDYWGQGTTVTVSSGGGGSGGGGSGGGGSDIQMTQSPSFLSASVGDRVTITCKASQNVGINVVWHQQKPGKAPKALICSSSHRYSGVPSRFSGSGSGTEFTLTISSLQPEDFATYFCQQFKSYPLTFGQGTKLEIK

SEQ ID NO: 74 - protein, 241 aa, synthetic construct
DIQMTQSPSFLSASVGDRVTITCKASQNVGINVVWHQQKPGKAPKALICSSSHRYSGVPSRFSGSGSGTEFTLTISSLQPEDFATYFCQQFKSYPLTFGQGTKLEIKGGGGSGGGGSGGGGSQVQLVQSGAEVKKPGSSVKVSCKASGHDFRLTYIHWVRQAPGQGLEWMGRVSAGSGNVKYNEKFKGRVTITADTSTSTAYMELSSLRSEDTAVYYCAVSYYSYDVCDYWGQGTTVTVSS

SEQ ID NO: 75 - protein, 241 aa, synthetic construct
QVQLVQSGAEVKKPGSSVKVSCKASGHDFRLTYIHWVRQAPGQGLEWMGRVSAGSGNVKYNEKFKGRVTITADTSTSTAYMELSSLRSEDTAVYYCAVSYYSYCVLDYWGQGTTVTVSSGGGGSGGGGSGGGGSDIQMTQSPSFLSASVGDRVTITCKASQNVGINVVWHQQKPGKAPKALIYCSSHRYSGVPSRFSGSGSGTEFTLTISSLQPEDFATYFCQQFKSYPLTFGQGTKLEIK

SEQ ID NO: 76 - protein, 241 aa, synthetic construct
DIQMTQSPSFLSASVGDRVTITCKASQNVGINVVWHQQKPGKAPKALIYCSSHRYSGVPSRFSGSGSGTEFTLTISSLQPEDFATYFCQQFKSYPLTFGQGTKLEIKGGGGSGGGGSGGGGSQVQLVQSGAEVKKPGSSVKVSCKASGHDFRLTYIHWVRQAPGQGLEWMGRVSAGSGNVKYNEKFKGRVTITADTSTSTAYMELSSLRSEDTAVYYCAVSYYSYCVLDYWGQGTTVTVSS

SEQ ID NO: 77 - protein, 241 aa, synthetic construct
QVQLVQSGAEVKKPGSSVKVSCKASGHDFRLTYIHWVRQAPGQGLEWMGRVSAGSGNVKYNEKFKGRVTITADTSTSTAYMELSSLRSEDTAVYYCAVSYYSYDVLDYWGCGTTVTVSSGGGGSGGGGSGGGGSDIQMTQSPSFLSASVGDRVTITCKASQNVGINVVWHQQKPGKCPKALIYSSSHRYSGVPSRFSGSGSGTEFTLTISSLQPEDFATYFCQQFKSYPLTFGQGTKLEIK

SEQ ID NO: 78 - protein, 241 aa, synthetic construct
DIQMTQSPSFLSASVGDRVTITCKASQNVGINVVWHQQKPGKCPKALIYSSSHRYSGVPSRFSGSGSGTEFTLTISSLQPEDFATYFCQQFKSYPLTFGQGTKLEIKGGGGSGGGGSGGGGSQVQLVQSGAEVKKPGSSVKVSCKASGHDFRLTYIHWVRQAPGQGLEWMGRVSAGSGNVKYNEKFKGRVTITADTSTSTAYMELSSLRSEDTAVYYCAVSYYSYDVLDYWGCGTTVTVSS

SEQ ID NO: 79 - protein, 241 aa, synthetic construct
QVQLVQSGAEVKKPGSSVKVSCKASGHDFRLTYIHWVRQAPGQGLEWMGRVSAGSGNVKYNEKFKGRVTITADTSTSTAYMELSSLRSEDTAVYYCAVSYYSYDVLCYWGQGTTVTVSSGGGGSGGGGSGGGGSDIQMTQSPSFLSASVGDRVTITCKASQNVGINVVWHQQKPGKAPKCLIYSSSHRYSGVPSRFSGSGSGTEFTLTISSLQPEDFATYFCQQFKSYPLTFGQGTKLEIK

SEQ ID NO: 80 - protein, 241 aa, synthetic construct
DIQMTQSPSFLSASVGDRVTITCKASQNVGINVVWHQQKPGKAPKCLIYSSSHRYSGVPSRFSGSGSGTEFTLTISSLQPEDFATYFCQQFKSYPLTFGQGTKLEIKGGGGSGGGGSGGGGSQVQLVQSGAEVKKPGSSVKVSCKASGHDFRLTYIHWVRQAPGQGLEWMGRVSAGSGNVKYNEKFKGRVTITADTSTSTAYMELSSLRSEDTAVYYCAVSYYSYDVLCYWGQGTTVTVSS

SEQ ID NO: 81 - protein, 238 aa, synthetic construct
EVQLVESGGGLVQPGGSLRLSCAASGFTFSNFGMHWVRQAPGKGLEWVSYISSGSSTIYYADTLKGRFTISRDNSKNTLYLQMNSLRAEDTAVYYCARRGEGAMDYWGQGTTVTVSSGGGGSGGGGSGGGGSDNQLTQSPSFLSASVGDRVTITCRASSSVNYIYWYQQKPGKAPKLLIYYTSNLAPGVPSRFSGSGSGNEYTLTISSLQPEDFATYYCQQFTSSPFTFGQGTKLEIK

SEQ ID NO: 82 - protein, 238 aa, synthetic construct
DNQLTQSPSFLSASVGDRVTITCRASSSVNYIYWYQQKPGKAPKLLIYYTSNLAPGVPSRFSGSGSGNEYTLTISSLQPEDFATYYCQQFTSSPFTFGQGTKLEIKGGGGSGGGGSGGGGSEVQLVESGGGLVQPGGSLRLSCAASGFTFSNFGMHWVRQAPGKGLEWVSYISSGSSTIYYADTLKGRFTISRDNSKNTLYLQMNSLRAEDTAVYYCARRGEGAMDYWGQGTTVTVSS

SEQ ID NO: 83 - protein, 238 aa, synthetic construct
EVQLVESGGGLVQPGGSLRLSCAASGFTFSNFGMHWVRQAPGKCLEWVSYISSGSSTIYYADTLKGRFTISRDNSKNTLYLQMNSLRAEDTAVYYCARRGEGAMDYWGQGTTVTVSSGGGGSGGGGSGGGGSDNQLTQSPSFLSASVGDRVTITCRASSSVNYIYWYQQKPGKAPKLLIYYTSNLAPGVPSRFSGSGSGNEYTLTISSLQPEDFATYYCQQFTSSPFTFGCGTKLEIK

SEQ ID NO: 84 - protein, 238 aa, synthetic construct
DNQLTQSPSFLSASVGDRVTITCRASSSVNYIYWYQQKPGKAPKLLIYYTSNLAPGVPSRFSGSGSGNEYTLTISSLQPEDFATYYCQQFTSSPFTFGCGTKLEIKGGGGSGGGGSGGGGSEVQLVESGGGLVQPGGSLRLSCAASGFTFSNFGMHWVRQAPGKCLEWVSYISSGSSTIYYADTLKGRFTISRDNSKNTLYLQMNSLRAEDTAVYYCARRGEGAMDYWGQGTTVTVSS

SEQ ID NO: 85 - protein, 238 aa, synthetic construct
EVQLVESGGGLVQPGGSLRLSCAASGFTFSNFGMHWVRQAPGKGLEWVSYISSGSSTIYYADTLKGRFTISRDNSKNTLYLQMNSLRAEDTAVYYCARRGEGACDYWGQGTTVTVSSGGGGSGGGGSGGGGSDNQLTQSPSFLSASVGDRVTITCRASSSVNYIYWYQQKPGKAPKLLIYCTSNLAPGVPSRFSGSGSGNEYTLTISSLQPEDFATYYCQQFTSSPFTFGQGTKLEIK

SEQ ID NO: 86 - protein, 238 aa, synthetic construct
DNQLTQSPSFLSASVGDRVTITCRASSSVNYIYWYQQKPGKAPKLLIYCTSNLAPGVPSRFSGSGSGNEYTLTISSLQPEDFATYYCQQFTSSPFTFGQGTKLEIKGGGGSGGGGSGGGGSEVQLVESGGGLVQPGGSLRLSCAASGFTFSNFGMHWVRQAPGKGLEWVSYISSGSSTIYYADTLKGRFTISRDNSKNTLYLQMNSLRAEDTAVYYCARRGEGACDYWGQGTTVTVSS

SEQ ID NO: 87 - protein, 238 aa, synthetic construct
EVQLVESGGGLVQPGGSLRLSCAASGFTFSNFGMHWVRQAPGKGLEWVSYISSGSSTIYYADTLKGRFTISRDNSKNTLYLQMNSLRAEDTAVYYCARRGEGAMDYWGCGTTVTVSSGGGGSGGGGSGGGGSDNQLTQSPSFLSASVGDRVTITCRASSSVNYIYWYQQKPGKCPKLLIYYTSNLAPGVPSRFSGSGSGNEYTLTISSLQPEDFATYYCQQFTSSPFTFGQGTKLEIK

SEQ ID NO: 88 - protein, 238 aa, synthetic construct
DNQLTQSPSFLSASVGDRVTITCRASSSVNYIYWYQQKPGKCPKLLIYYTSNLAPGVPSRFSGSGSGNEYTLTISSLQPEDFATYYCQQFTSSPFTFGQGTKLEIKGGGGSGGGGSGGGGSEVQLVESGGGLVQPGGSLRLSCAASGFTFSNFGMHWVRQAPGKGLEWVSYISSGSSTIYYADTLKGRFTISRDNSKNTLYLQMNSLRAEDTAVYYCARRGEGAMDYWGCGTTVTVSS

SEQ ID NO: 89 - protein, 238 aa, synthetic construct
EVQLVESGGGLVQPGGSLRLSCAASGFTFSNFGMHWVRQAPGKGLEWVSYISSGSSTIYYADTLKGRFTISRDNSKNTLYLQMNSLRAEDTAVYYCARRGEGAMCYWGQGTTVTVSSGGGGSGGGGSGGGGSDNQLTQSPSFLSASVGDRVTITCRASSSVNYIYWYQQKPGKAPKCLIYYTSNLAPGVPSRFSGSGSGNEYTLTISSLQPEDFATYYCQQFTSSPFTFGQGTKLEIK

SEQ ID NO: 90 - protein, 238 aa, synthetic construct
DNQLTQSPSFLSASVGDRVTITCRASSSVNYIYWYQQKPGKAPKCLIYYTSNLAPGVPSRFSGSGSGNEYTLTISSLQPEDFATYYCQQFTSSPFTFGQGTKLEIKGGGGSGGGGSGGGGSEVQLVESGGGLVQPGGSLRLSCAASGFTFSNFGMHWVRQAPGKGLEWVSYISSGSSTIYYADTLKGRFTISRDNSKNTLYLQMNSLRAEDTAVYYCARRGEGAMCYWGQGTTVTVSS

SEQ ID NO: 91 - protein, 238 aa, synthetic construct
EVQLVESGGGLVQPGGSLRLSCAASGFTFSNFGMHWVRQAPGKGLEWVSYISSGSSTIYYADTLKGRFTISRDNSKNTLYLQMNSLRAEDTAVYYCARRGEGAMDYWGQGTLVTVSSGGGGSGGGGSGGGGSDNQLTQSPSFLSASVGDRVTITCRASSSVNYIYWYQQKPGKAPKLLIYYTSNLAPGVPSRFSGSGSGNEYTLTISSLQPEDFATYYCQQFTSSPFTFGQGTKLEIK

SEQ ID NO: 92 - protein, 238 aa, synthetic construct
EVQLVESGGGLVQPGGSLRLSCAASGFTFSNFGMHWVRQAPGKCLEWVSYISSGSSTIYYADTLKGRFTISRDNSKNTLYLQMNSLRAEDTAVYYCARRGEGAMDYWGQGTLVTVSSGGGGSGGGGSGGGGSDNQLTQSPSFLSASVGDRVTITCRASSSVNYIYWYQQKPGKAPKLLIYYTSNLAPGVPSRFSGSGSGNEYTLTISSLQPEDFATYYCQQFTSSPFTFGCGTKLEIK

SEQ ID NO: 93 - protein, 5 aa, synthetic construct
GSGSG

SEQ ID NO: 94 - protein, 7 aa, synthetic construct
GGSGGGG

SEQ ID NO: 95 - protein, 5 aa, synthetic construct
GGGGS

SEQ ID NO: 96 - protein, 10 aa, synthetic construct
GGGGSGGGGS

SEQ ID NO: 97 - protein, 15 aa, synthetic construct
GGGGSGGGGSGGGGS

SEQ ID NO: 98 - protein, 20 aa, synthetic construct
GGGGSGGGGSGGGGSGGGGS

SEQ ID NO: 99 - protein, 25 aa, synthetic construct
GGGGSGGGGSGGGGSGGGGSGGGGS

SEQ ID NO: 100 - protein, 95 aa, Homo sapiens
DAGVTQSPTHLIKTRGQQVTLRCSPISGHKSVSWYQQVLGQGPQFIFQYYEKEERGRGNFPDRFSARQFPNYSSELNVNALLLGDSALYLCASSL

SEQ ID NO: 101 - protein, 94 aa, Macaca fascicularis
DGGVTQSPRHLIKTTGQQVTLRCSPISGHTSVSWYQQALGQGPQFIFEYEEKERERGNFPDRFSGHQFSNYSSELNVNALEAGDSALYLCASSL

SEQ ID NO: 102 - protein, 95 aa, Homo sapiens
DAGVTQSPTHLIKTRGQQVTLRCSPKSGHDTVSWYQQALGQGPQFIFQYYEEEERQRGNFPDRFSGHQFPNYSSELNVNALLLGDSALYLCASSL

SEQ ID NO: 103 - protein, 94 aa, Macaca fascicularis; identical to SEQ ID NO: 101

SEQ ID NO: 104 - protein, 95 aa, Macaca mulatta
DTGVTQSPTHLIRKRGQQVTLRCSPISGHNTVSWYQQALGQGPQFIFQYYEKEERERGNFPGRFSGHQFPNYSSELNVSALLLGDSALYLCASSL

SEQ ID NO: 105 - protein, 95 aa, Homo sapiens
NAGVTQTPKFQVLKTGQSMTLQCAQDMNHEYMSWYRQDPGMGLRLIHYSVGAGITDQGEVPNGYNVSRSTTEDFPLRLLSAAPSQTSVYFCASSY

SEQ ID NO: 106 - protein, 95 aa, Macaca fascicularis
NVGVTQTPKFQVLKTGQSMTVQCAQDMNHNFMYWYRQDPGMGLRLIHYSGAAGTTDKGEVPSGYNVSRLNTEDFPLRLESADPSQTSVYICASSY

SEQ ID NO: 107 - protein, 95 aa, Macaca mulatta
NVGVTQTPKFQVLKTGQSMTVQCAQDMNHNFMYWYRQDPGMGLRLIHYSGAAGTTDKGEVPSGYNVSRLNTEDFPLRLESADPSQTSVYFCASSY

SEQ ID NO: 108 - protein, 96 aa, Homo sapiens
DAGVIQSPRHEVTEMGQEVTLRCKPISGHNSLFWYRQTMMRGLELLIYFNNNVPIDDSGMPEDRFSAKMPNASFSTLKIQPSEPRDSAVYFCASSL

SEQ ID NO: 109 - protein, 96 aa, Macaca fascicularis
DAGVIQSPRHEVTEMGKEVTLRCEPISGHTYLFWYRQTMMRGLEFLIYFNNKSPIDDSGMPKDRFSAKMPDASFSTLKIQPSEPRDSAVYFCASSL

SEQ ID NO: 110 - protein, 96 aa, Macaca mulatta
DAGVIQSPQHEVTEMGKEVTLRCEPISGHTYLFWYRQTMMRGLEFLIYFNNKSPIDDSGMPKDRFSATMPEVSFSTLKIQPSEPRDSAVYFCASSL

SEQ ID NO: 111 - protein, 96 aa, Homo sapiens
DAGVIQSPRHEVTEMGQEVTLRCKPISGHDYLFWYRQTMMRGLELLIYFNNNVPIDDSGMPEDRFSAKMPNASFSTLKIQPSEPRDSAVYFCASSL

SEQ ID NO: 112 - protein, 96 aa, Macaca fascicularis
DAGVTQTPRHKVTEMGQEVTMRCQPILGHNTVFWYRQTVMQGLELLVYLRNKASLDDSGMPKDRFSAEMPDASLATLKIQPSEPRDSAVYLCASGL

SEQ ID NO: 113 - protein, 96 aa, Macaca mulatta; identical to SEQ ID NO: 112

SEQ ID NO: 114 - protein, 97 aa, Homo sapiens
GAVVSQHPSWVICKSGTSVKIECRSLDFQATTMFWYRQFPKQSLMLMATSNEGSKATYEQGVEKDKFLINHASLTLSTLTVTSAHPEDSSFYICSAR

SEQ ID NO: 115 - protein, 97 aa, Macaca fascicularis
AAVVSQYPSRVICKRGTSVKIECRCLDFQATTMFWYRQFQTQSLILMATSNEGSGVTYEQGVKQDKFPINHPNLTFSTLTVTNAHPEDSSFYICSAR

SEQ ID NO: 116 - protein, 97 aa, Macaca mulatta; identical to SEQ ID NO: 115

SEQ ID NO: 117-133 - skipped (17 entries)

SEQ ID NO: 134 - protein, 5 aa, synthetic construct
DTHMH

SEQ ID NO: 135 - protein, 17 aa, synthetic construct
RTDPASGDTKYDPKFQG

SEQ ID NO: 136 - protein, 12 aa, synthetic construct
YYRDDVNYAMDY

SEQ ID NO: 137 - protein, 11 aa, synthetic construct
KARQNVGSNVA

SEQ ID NO: 138 - protein, 7 aa, synthetic construct
SSSFRYS

SEQ ID NO: 139 - protein, 9 aa, synthetic construct
QQYNTYPYT

SEQ ID NO: 140 - protein, 8 aa, synthetic construct
GFNIKDTH

SEQ ID NO: 141 - protein, 8 aa, synthetic construct
TDPASGDT

SEQ ID NO: 142 - protein, 14 aa, synthetic construct
AHYYRDDVNYAMDY

SEQ ID NO: 143 - protein, 6 aa, synthetic construct
QNVGSN

SEQ ID NO: 144 - skipped

SEQ ID NO: 145 - protein, 9 aa, synthetic construct
QQYNTYPYT

SEQ ID NO: 146 - protein, 121 aa, synthetic construct
EVQLQQSGAELVKPGASVKLSCTASGFNIKDTHMHWVKQRPEQGLEWIGRTDPASGDTKYDPKFQGKATITADTSSNTAYLHLSSLTSEDTAVYYCAHYYRDDVNYAMDYWGQGTTVTVSS

SEQ ID NO: 147 - protein, 107 aa, synthetic construct
DIVMTQSQKFLSTSVGDRVSVTCKARQNVGSNVAWYQQKPGQSPKSLIYSSSFRYSGVPDRFTGSGSGTDFTLTISNVQSEDLAEYFCQQYNTYPYTFGGGTELEIK

SEQ ID NO: 148 - protein, 243 aa, synthetic construct
EVQLQQSGAELVKPGASVKLSCTASGFNIKDTHMHWVKQRPEQGLEWIGRTDPASGDTKYDPKFQGKATITADTSSNTAYLHLSSLTSEDTAVYYCAHYYRDDVNYAMDYWGQGTTVTVSSGGGGSGGGGSGGGGSDIVMTQSQKFLSTSVGDRVSVTCKARQNVGSNVAWYQQKPGQSPKSLIYSSSFRYSGVPDRFTGSGSGTDFTLTISNVQSEDLAEYFCQQYNTYPYTFGGGTELEIK

SEQ ID NO: 149 - protein, 105 aa, Homo sapiens
WGVFLLYVSMKMGGTTGQNIDQPTEMTATEGAIVQINCTYQTSGFNGLFWYQQHAGEAPTFLSYNVLDGLEEKGRFSSFLSRSKGYSYLLLKELQMKDSASYLCA

SEQ ID NO: 150 - protein, 249 aa, synthetic construct
EVQLVESGGGLVQPGGSLKLSCAASGFTFNKYAMNWVRQAPGKGLEWVARIRSKYNNYATYYADSVKDRFTISRDDSKNTAYLQMNNLKTEDTAVYYCVRHGNFGNSYISYWAYWGQGTLVTVSSGGGGSGGGGSGGGGSQTVVTQEPSLTVSPGGTVTLTCGSSTGAVTSGNYPNWVQQKPGQAPRGLIGGTKFLAPGTPARFSGSLLGGKAALTLSGVQPEDEAEYYCVLWYSNRWVFGGGTKLTVL

SEQ ID NO: 151 - protein, 537 aa, Homo sapiens
PEEPLVVKVEEGDNAVLQCLKGTSDGPTQQLTWSRESPLKPFLKLSLGLPGLGIHMRPLAIWLFIFNVSQQMGGFYLCQPGPPSEKAWQPGWTVNVEGSGELFRWNVSDLGGLGCGLKNRSSEGPSSPSGKLMSPKLYVWAKDRPEIWEGEPPCLPPRDSLNQSLSQDLTMAPGSTLWLSCGVPPDSVSRGPLSWTHVHPKGPKSLLSLELKDDRPARDMWVMETGLLLPRATAQDAGKYYCHRGNLTMSFHLEITARPVLWHWLLRTGGWKVSAVTLAYLIFCLCSLVGILHLQRALVLRRKRKRMTDPTRRFFKVTPPPGSGPQNQYGNVLSLPTPTSGLGRAQRWAAGLGGTAPSYGNPSSDVQADGALGSRSPPGVGPEEEEGEGYEEPDSEEDSEFYENDSNLGQDQLSQDGSGYENPEDEPLGPEDEDSFSNAESYENEDEELTQPVARTMDFLSPHGSAWDPSREATSLGSQSYEDMRGILYAAPQLRSIRGQPGPNHEEDADSYENMDNPDGPDPAWGGGGRMGTWSTR

SEQ ID NO: 152 - protein, 537 aa, Macaca fascicularis
QEPLVVKVEEGDNAVLQCLEGTSDGPTQQLVWCRDSPFEPFLNLSLGLPGMGIRMGPLGIWLLIFNVSNQTGGFYLCQPGLPSEKAWQPGWTVSVEGSGELFRWNVSDLGGLGCGLKNRSSEGPSSPSGKLNSSQLYVWAKDRPEMWEGEPVCGPPRDSLNQSLSQDLTMAPGSTLWLSCGVPPDSVSRGPLSWTHVRPKGPKSSLLSLELKDDRPDRDMWVVDTGLLLTRATAQDAGKYYCHRGNWTKSFYLEITARPALWHWLLRIGGWKVPAVTLTYLIFCLCSLVGILQLQRALVLRRKRKRMTDPTRRFFKVTPPPGSGPQNQYGNVLSLPTPTSGLGRAQRWAAGLGGTAPSYGNPSSDVQVDGAVGSRSPPGAGPEEEEGEGYEEPDSEEGSEFYENDSNFGQDQLSQDGSGYENPEDEPLGPEDEDSFSNAESYENEDEELTQPVARTMDFLSPHGSAWDPSREATSLGSQSYEDMRGLLYAAPQLRTIRGQPGPNHEEDADSYENMDNPDGPDPAWGGGGRMGTWSAR

SEQ ID NO: 153 - protein, 537 aa, Macaca mulatta; identical to SEQ ID NO: 152

SEQ ID NO: 154 - protein, 225 aa, synthetic construct
DKTHTCPPCPAPEAAGGPSVFLFPPKPKDTLMISRTPEVTCVVVDVSHEDPEVKFNWYVDGVEVHNAKTKPREEQYGSTYRVVSVLTVLHQDWLNGKEYKCKVSNKALGAPIEKTISKAKGQPREPQVCTLPPSRDELTKNQVSLSCAVKGFYPSDIAVEWESNGQPENNYKTTPPVLDSDGSFFLVSKLTVDKSRWQQGNVFSCSVMHEALHNHYTQKSLSLSP

SEQ ID NO: 155 - protein, 225 aa, synthetic construct
DKTHTCPPCPAPEAAGGPSVFLFPPKPKDTLMISRTPEVTCVVVDVSHEDPEVKFNWYVDGVEVHNAKTKPREEQYGSTYRVVSVLTVLHQDWLNGKEYKCKVSNKALGAPIEKTISKAKGQPREPQVYTLPPCRDELTKNQVSLWCLVKGFYPSDIAVEWESNGQPENNYKTTPPVLDSDGSFFLYSKLTVDKSRWQQGNVFSCSVMHEALHNHYTQKSLSLSP

SEQ ID NO: 156 - protein, 227 aa, synthetic construct
DKTHTCPPCPAPEAAGGPSVFLFPPKPKDTLMISRTPEVTCVVVDVSHEDPEVKFNWYVDGVEVHNAKTKPREEQYNSTYRVVSVLTVLHQDWLNGKEYKCKVSNKALGAPIEKTISKAKGQPREPQVCTLPPSRDELTKNQVSLSCAVKGFYPSDIAVEWESNGQPENNYKTTPPVLDSDGSFFLVSKLTVDKSRWQQGNVFSCSVMHEALHNRFTQKSLSLSPGK

SEQ ID NO: 157 - protein, 227 aa, synthetic construct
DKTHTCPPCPAPEAAGGPSVFLFPPKPKDTLMISRTPEVTCVVVDVSHEDPEVKFNWYVDGVEVHNAKTKPREEQYNSTYRVVSVLTVLHQDWLNGKEYKCKVSNKALGAPIEKTISKAKGQPREPQVYTLPPCRDELTKNQVSLWCLVKGFYPSDIAVEWESNGQPENNYKTTPPVLDSDGSFFLYSKLTVDKSRWQQGNVFSCSVMHEALHNHYTQKSLSLSPGK

SEQ ID NO: 158 - protein, 6 aa, synthetic construct
KTHTCP

SEQ ID NO: 159 - protein, 16 aa, synthetic construct
GGGGSGGGGSKTHTCP

SEQ ID NO: 160 - protein, 7 aa, synthetic construct
DKTHTCP

SEQ ID NO: 161 - protein, 10 aa, synthetic construct
DKTHTCPPCP

SEQ ID NO: 162 - protein, 15 aa, synthetic construct
EPKSCDKTHTCPPCP

SEQ ID NO: 163 - protein, 12 aa, synthetic construct
ERKCCVECPPCP

SEQ ID NO: 164 - protein, 17 aa, synthetic construct
ELKTPLGDTTHTCPRCP

SEQ ID NO: 165 - protein, 15 aa, synthetic construct
EPKSCDTPPPCPRCP

SEQ ID NO: 166 - protein, 12 aa, synthetic construct
ESKYGPPCPSCP

SEQ ID NO: 167 - protein, 20 aa, synthetic construct
ASPAAPAPASPAAPAPSAPA

SEQ ID NO: 168 - protein, 20 aa, synthetic construct
AAPASPAPAAPSAPAPAAPS

SEQ ID NO: 169 - protein, 20 aa, synthetic construct
APSSPSPSAPSSPSPASPSS

SEQ ID NO: 170 - protein, 19 aa, synthetic construct
APSSPSPSAPSSPSPASPS

SEQ ID NO: 171 - protein, 20 aa, synthetic construct
SSPSAPSPSSPASPSPSSPA

SEQ ID NO: 172 - protein, 24 aa, synthetic construct
AASPAAPSAPPAAASPAAPSAPPA

SEQ ID NO: 173 - protein, 20 aa, synthetic construct
ASAAAPAAASAAASAPSAAA

SEQ ID NO: 174-200 - skipped (27 entries)

SEQ ID NO: 201 - protein, 5 aa, synthetic construct
KYAMN

SEQ ID NO: 202 - protein, 19 aa, synthetic construct
RIRSKYNNYATYYADSVKD

SEQ ID NO: 203 - protein, 14 aa, synthetic construct
HGNFGNSYISYWAY

SEQ ID NO: 204 - protein, 14 aa, synthetic construct
GSSTGAVTSGNYPN

SEQ ID NO: 205 - protein, 7 aa, synthetic construct
GTKFLAP

SEQ ID NO: 206 - protein, 9 aa, synthetic construct
VLWYSNRWV

SEQ ID NO: 207 - protein, 8 aa, synthetic construct
GFTFNKYA

SEQ ID NO: 208 - protein, 10 aa, synthetic construct
IRSKYNNYAT

SEQ ID NO: 209 - protein, 16 aa, synthetic construct
VRHGNFGNSYISYWAY

SEQ ID NO: 210 - protein, 9 aa, synthetic construct
TGAVTSGNY

SEQ ID NO: 211 - skipped

SEQ ID NO: 212 - protein, 9 aa, synthetic construct
VLWYSNRWV

SEQ ID NO: 213 - protein, 125 aa, synthetic construct
EVQLVESGGGLVQPGGSLKLSCAASGFTFNKYAMNWVRQAPGKGLEWVARIRSKYNNYATYYADSVKDRFTISRDDSKNTAYLQMNNLKTEDTAVYYCVRHGNFGNSYISYWAYWGQGTLVTVSS

SEQ ID NO: 214 - protein, 109 aa, synthetic construct
QTVVTQEPSLTVSPGGTVTLTCGSSTGAVTSGNYPNWVQQKPGQAPRGLIGGTKFLAPGTPARFSGSLLGGKAALTLSGVQPEDEAEYYCVLWYSNRWVFGGGTKLTVL

SEQ ID NO: 215 - protein, 249 aa, synthetic construct; identical to SEQ ID NO: 150

SEQ ID NO: 216 - protein, 243 aa, synthetic construct
DIKLQQSGAELARPGASVKMSCKTSGYTFTRYTMHWVKQRPGQGLEWIGYINPSRGYTNYNQKFKDKATLTTDKSSSTAYMQLSSLTSEDSAVYYCARYYDDHYCLDYWGQGTTLTVSSVEGGSGGSGGSGGSGGVDDIQLTQSPAIMSASPGEKVTMTCRASSSVSYMNWYQQKSGTSPKRWIYDTSKVASGVPYRFSGSGSGTSYSLTISSMEAEDAATYYCQQWSSNPLTFGAGTKLELK

SEQ ID NO: 217 - protein, 228 aa, synthetic construct
EVQLVESGGGLVQPGGSLKLSCAASGFTFNKYAMNWVRQAPGKGLEWVARIRSKYNNYATYYADSVKDRFTISRDDSKNTAYLQMNNLKTEDTAVYYCVRHGNFGNSYISYWAYWGQGTLVTVSSASTKGPSVFPLAPSSKSTSGGTAALGCLVKDYFPEPVTVSWNSGALTSGVHTFPAVLQSSGLYSLSSVVTVPSSSLGTQTYICNVNHKPSNTKVDKKVEPKSC

SEQ ID NO: 218 - protein, 215 aa, synthetic construct
QTVVTQEPSLTVSPGGTVTLTCGSSTGAVTSGNYPNWVQQKPGQAPRGLIGGTKFLAPGTPARFSGSLLGGKAALTLSGVQPEDEAEYYCVLWYSNRWVFGGGTKLTVLGQPKAAPSVTLFPPSSEELQANKATLVCLISDFYPGAVTVAWKADSSPVKAGVETTTPSKQSNNKYAASSYLSLTPEQWKSHRSYSCQVTHEGSTVEKTVAPTECS

SEQ ID NO: 219 - protein, 214 aa, synthetic construct
QTVVTQEPSLTVSPGGTVTLTCGSSTGAVTSGNYPNWVQQKPGQAPRGLIGGTKFLAPGTPARFSGSLLGGKAALTLSGVQPEDEAEYYCVLWYSNRWVFGGGTKLTVLSSASTKGPSVFPLAPSSKSTSGGTAALGCLVKDYFPEPVTVSWNSGALTSGVHTFPAVLQSSGLYSLSSVVTVPSSSLGTQTYICNVNHKPSNTKVDKKVEPKSC

SEQ ID NO: 220 - protein, 232 aa, synthetic construct
EVQLVESGGGLVQPGGSLKLSCAASGFTFNKYAMNWVRQAPGKGLEWVARIRSKYNNYATYYADSVKDRFTISRDDSKNTAYLQMNNLKTEDTAVYYCVRHGNFGNSYISYWAYWGQGTLVTVSSASVAAPSVFIFPPSDEQLKSGTASVVCLLNNFYPREAKVQWKVDNALQSGNSQESVTEQDSKDSTYSLSSTLTLSKADYEKHKVYACEVTHQGLSSPVTKSFNRGEC

SEQ ID NO: 221 - protein, 5 aa, synthetic construct
NYGMH

SEQ ID NO: 222 - protein, 17 aa, synthetic construct
YISSGSSTIYYADALKG

SEQ ID NO: 223 - protein, 10 aa, synthetic construct
RASQSVNYIY

SEQ ID NO: 224 - protein, 9 aa, synthetic construct
QQYTSSPFT

SEQ ID NO: 225 - protein, 10 aa, synthetic construct
RASQSVNYLY

SEQ ID NO: 226 - protein, 8 aa, synthetic construct
GFTFSNYG

SEQ ID NO: 227 - protein, 5 aa, synthetic construct
QSVNY

SEQ ID NO: 228 - protein, 5 aa, synthetic construct
SAYMH

SEQ ID NO: 229 - protein, 17 aa, synthetic construct
RIDPATGKTKYAPKFQA

SEQ ID NO: 230 - protein, 10 aa, synthetic construct
SLNWDYGLDY

SEQ ID NO: 231 - protein, 15 aa, synthetic construct
RASKSVSILGTHLIH

SEQ ID NO: 232 - protein, 7 aa, synthetic construct
AASNLES

SEQ ID NO: 233 - protein, 9 aa, synthetic construct
QQSIEDPWT

SEQ ID NO: 234 - protein, 8 aa, synthetic construct
GFNIKSAY

SEQ ID NO: 235 - protein, 8 aa, synthetic construct
IDPATGKT

SEQ ID NO: 236 - protein, 12 aa, synthetic construct
TRSLNWDYGLDY

SEQ ID NO: 237 - protein, 10 aa, synthetic construct
KSVSILGTHL

SEQ ID NO: 238 - skipped

SEQ ID NO: 239 - protein, 9 aa, synthetic construct
QQSIEDPWT

SEQ ID NO: 240 - protein, 119 aa, synthetic construct
EVQLQQSVADLVRPGASLKLSCTASGFNIKSAYMHWVIQRPDQGPECLGRIDPATGKTKYAPKFQAKATITADTSSNTAYLQLSSLTSEDTAIYYCTRSLNWDYGLDYWGQGTSVTVSS

SEQ ID NO: 241 - protein, 111 aa, synthetic construct
DIVLTQSPASLAVSLGQRATISCRASKSVSILGTHLIHWYQQKPGQPPKLLIYAASNLESGVPARFSGSGSETVFTLNIHPVEEEDAATYFCQQSIEDPWTFGGGTKLGIK

SEQ ID NO: 242 - protein, 245 aa, synthetic construct
EVQLQQSVADLVRPGASLKLSCTASGFNIKSAYMHWVIQRPDQGPECLGRIDPATGKTKYAPKFQAKATITADTSSNTAYLQLSSLTSEDTAIYYCTRSLNWDYGLDYWGQGTSVTVSSGGGGSGGGGSGGGGSDIVLTQSPASLAVSLGQRATISCRASKSVSILGTHLIHWYQQKPGQPPKLLIYAASNLESGVPARFSGSGSETVFTLNIHPVEEEDAATYFCQQSIEDPWTFGGGTKLGIK

SEQ ID NO: 243 - protein, 222 aa, synthetic construct
EVQLQQSVADLVRPGASLKLSCTASGFNIKSAYMHWVIQRPDQGPECLGRIDPATGKTKYAPKFQAKATITADTSSNTAYLQLSSLTSEDTAIYYCTRSLNWDYGLDYWGQGTSVTVSSASTKGPSVFPLAPSSKSTSGGTAALGCLVKDYFPEPVTVSWNSGALTSGVHTFPAVLQSSGLYSLSSVVTVPSSSLGTQTYICNVNHKPSNTKVDKKVEPKSC

SEQ ID NO: 244 - protein, 218 aa, synthetic construct
DIVLTQSPASLAVSLGQRATISCRASKSVSILGTHLIHWYQQKPGQPPKLLIYAASNLESGVPARFSGSGSETVFTLNIHPVEEEDAATYFCQQSIEDPWTFGGGTKLGIKRTVAAPSVFIFPPSDEQLKSGTASVVCLLNNFYPREAKVQWKVDNALQSGNSQESVTEQDSKDSTYSLSSTLTLSKADYEKHKVYACEVTHQGLSSPVTKSFNRGEC

SEQ ID NO: 245 - protein, 216 aa, synthetic construct
DIVLTQSPASLAVSLGQRATISCRASKSVSILGTHLIHWYQQKPGQPPKLLIYAASNLESGVPARFSGSGSETVFTLNIHPVEEEDAATYFCQQSIEDPWTFGGGTKLGIKSSASTKGPSVFPLAPSSKSTSGGTAALGCLVKDYFPEPVTVSWNSGALTSGVHTFPAVLQSSGLYSLSSVVTVPSSSLGTQTYICNVNHKPSNTKVDKKVEPKSC

SEQ ID NO: 246 - protein, 226 aa, synthetic construct
EVQLQQSVADLVRPGASLKLSCTASGFNIKSAYMHWVIQRPDQGPECLGRIDPATGKTKYAPKFQAKATITADTSSNTAYLQLSSLTSEDTAIYYCTRSLNWDYGLDYWGQGTSVTVSSASVAAPSVFIFPPSDEQLKSGTASVVCLLNNFYPREAKVQWKVDNALQSGNSQESVTEQDSKDSTYSLSSTLTLSKADYEKHKVYACEVTHQGLSSPVTKSFNRGEC

SEQ ID NO: 247-300 - skipped (54 entries)

SEQ ID NO: 301 - protein, 5 aa, synthetic construct
SYWMN

SEQ ID NO: 302 - protein, 5 aa, synthetic construct
SNWMH

SEQ ID NO: 303 - protein, 5 aa, synthetic construct
SYVMH

SEQ ID NO: 304 - protein, 7 aa, synthetic construct
TSGMGVG

SEQ ID NO: 305 - protein, 5 aa, synthetic construct
SSWMN

SEQ ID NO: 306 - protein, 7 aa, synthetic construct
TSTMGVG

SEQ ID NO: 307 - protein, 6 aa, synthetic construct
SGMGVS

SEQ ID NO: 308 - protein, 17 aa, synthetic construct
QIWPGDGDTNYNGKFKG

SEQ ID NO: 309 - protein, 17 aa, synthetic construct
EIDPSDSYTNYNQNFQG

SEQ ID NO: 310 - protein, 17 aa, synthetic construct
EIDPSDSYTNYNQKFKG

SEQ ID NO: 311 - protein, 17 aa, synthetic construct
YINPYNDGTKYNEKFQG

SEQ ID NO: 312 - protein, 16 aa, synthetic construct
HIWWDDDKRYNPALKS

SEQ ID NO: 313 - protein, 17 aa, synthetic construct
RIYPGDGDTNYNVKFKG

SEQ ID NO: 314 - protein, 16 aa, synthetic construct
FIWWDDDKRYNPNLKS

SEQ ID NO: 315 - protein, 15 aa, synthetic construct
RETTTVGRYYYAMDY

SEQ ID NO: 316 - protein, 11 aa, synthetic construct
GSNPYYYAMDY

SEQ ID NO: 317 - protein, 12 aa, synthetic construct
GTYYYGTRVFDY

SEQ ID NO: 318 - protein, 10 aa, synthetic construct
MELWSYYFDY

SEQ ID NO: 319 - protein, 12 aa, synthetic construct
SGFITTVRDFDY

SEQ ID NO: 320 - protein, 10 aa, synthetic construct
MELWSYYFDP

SEQ ID NO: 321 - protein, 15 aa, synthetic construct
KASQSVDYDGDSYLN

SEQ ID NO: 322 - protein, 10 aa, synthetic construct
SASSGVNYMH

SEQ ID NO: 323 - protein, 16 aa, synthetic construct
RSSKSLQNVNGNTYLY

SEQ ID NO: 324 - protein, 10 aa, synthetic construct
SASSSVSYMH

SEQ ID NO: 325 - protein, 15 aa, synthetic construct
RASESVDTFGISFMN

SEQ ID NO: 326 - protein, 10 aa, synthetic construct
SASSSVGYMH

SEQ ID NO: 327 - protein, 7 aa, synthetic construct
DASNLVS

SEQ ID NO: 328 - protein, 7 aa, synthetic construct
DTSKLAS

SEQ ID NO: 329 - protein, 7 aa, synthetic construct
RMSNLNS

SEQ ID NO: 330 - protein, 7 aa, synthetic construct
EASNQGS

SEQ ID NO: 331 - protein, 7 aa, synthetic construct
DTSKLAF

SEQ ID NO: 332 - protein, 9 aa, synthetic construct
QQSTEDPWT

SEQ ID NO: 333 - protein, 7 aa, synthetic construct
HQRGSYT

SEQ ID NO: 334 - protein, 9 aa, synthetic construct
MQHLEYPIT

SEQ ID NO: 335 - protein, 9 aa, synthetic construct
FQGSVYPFT

SEQ ID NO: 336 - protein, 9 aa, synthetic construct
QQSKEVPFT

SEQ ID NO: 337 - protein, 8 aa, synthetic construct
GYAFSSYW

SEQ ID NO: 338 - protein, 8 aa, synthetic construct
GYTFTSNW

SEQ ID NO: 339 - protein, 8 aa, synthetic construct
GYTFTSYV

SEQ ID NO: 340 - protein, 10 aa, synthetic construct
GGSISTSGMG

SEQ ID NO: 341 - protein, 8 aa, synthetic construct
GFTFSSSW

SEQ ID NO: 342 - protein, 10 aa, synthetic construct
GGSISTSTMG

SEQ ID NO: 343 - protein, 9 aa, synthetic construct
GGSIASGMG

SEQ ID NO: 344 - protein, 8 aa, synthetic construct
IWPGDGDT

SEQ ID NO: 345 - protein, 8 aa, synthetic construct
IDPSDSYT

SEQ ID NO: 346 - protein, 8 aa, synthetic construct
INPYNDGT

SEQ ID NO: 347 - protein, 7 aa, synthetic construct
IWWDDDK

SEQ ID NO: 348 - protein, 8 aa, synthetic construct
IYPGDGDT

SEQ ID NO: 349 - protein, 17 aa, synthetic construct
ARRETTTVGRYYYAMDY

SEQ ID NO: 350 - protein, 13 aa, synthetic construct
ARGSNPYYYAMDY

SEQ ID NO: 351 - protein, 14 aa, synthetic construct
ARGTYYYGTRVFDY

SEQ ID NO: 352 - protein, 12 aa, synthetic construct
ARMELWSYYFDY

SEQ ID NO: 353 - protein, 14 aa, synthetic construct
ARSGFITTVRDFDY

SEQ ID NO: 354 - protein, 12 aa, synthetic construct
ARMELWSYYFDP

SEQ ID NO: 355 - protein, 10 aa, synthetic construct
QSVDYDGDSY

SEQ ID NO: 356 - protein, 5 aa, synthetic construct
SGVNY

SEQ ID NO: 357 - protein, 11 aa, synthetic construct
KSLQNVNGNTY

SEQ ID NO: 358 - protein, 5 aa, synthetic construct
SSVSY

SEQ ID NO: 359 - protein, 10 aa, synthetic construct
ESVDTFGISF

SEQ ID NO: 360 - protein, 5 aa, synthetic construct
SSVGY

SEQ ID NO: 361-364 - skipped (4 entries)

SEQ ID NO: 365 - protein, 124 aa, synthetic construct
QVQLQQSGAELVRPGSSVKISCKASGYAFSSYWMNWVKQRPGQGLEWIGQIWPGDGDTNYNGKFKGKATLTADESSSTAYMQLSSLASEDSAVYFCARRETTTVGRYYYAMDYWGQGTTVTVSS

SEQ ID NO: 366 - protein, 111 aa, synthetic construct
DIQLTQSPASLAVSLGQRATISCKASQSVDYDGDSYLNWYQQIPGQPPKLLIYDASNLVSGIPPRFSGSGSGTDFTLNIHPVEKVDAATYHCQQSTEDPWTFGGGTKLEIK

SEQ ID NO: 367 - protein, 120 aa, synthetic construct
QVQLVQPGAEVVKPGASVKLSCKTSGYTFTSNWMHWVKQAPGQGLEWIGEIDPSDSYTNYNQNFQGKAKLTVDKSTSTAYMEVSSLRSDDTAVYYCARGSNPYYYAMDYWGQGTSVTVSS

SEQ ID NO: 368 - protein, 104 aa, synthetic construct
EIVLTQSPAIMSASPGERVTMTCSASSGVNYMHWYQQKPGTSPRRWIYDTSKLASGVPARFSGSGSGTSYSLTISSMEPEDAATYYCHQRGSYTFGGGTKLEIK

SEQ ID NO: 369 - protein, 120 aa, synthetic construct
QVQLVQSGAEVKKPGASVKVSCKASGYTFTSNWMHWVRQAPGQGLEWIGEIDPSDSYTNYNQKFKGRATLTVDKSTSTAYMELSSLRSEDTAVYYCARGSNPYYYAMDYWGQGTTVTVSS

SEQ ID NO: 370 - protein, 104 aa, synthetic construct
EIVLTQSPATLSLSPGERATLSCSASSGVNYMHWYQQKPGQAPRRWIYDTSKLASGIPARFSGSGSGTDFTLTISSLEPEDFAVYYCHQRGSYTFGGGTKVEIK

SEQ ID NO: 371 - protein, 121 aa, synthetic construct
EVQLVESGGGLVKPGGSLKLSCAASGYTFTSYVMHWVRQAPGKGLEWIGYINPYNDGTKYNEKFQGRVTISSDKSISTAYMELSSLRSEDTAMYYCARGTYYYGTRVFDYWGQGTLVTVSS

SEQ ID NO: 372 - protein, 112 aa, synthetic construct
DIVMTQSPATLSLSPGERATLSCRSSKSLQNVNGNTYLYWFQQKPGQSPQLLIYRMSNLNSGVPDRFSGSGSGTEFTLTISSLEPEDFAVYYCMQHLEYPITFGAGTKLEIK

SEQ ID NO: 373 - protein, 120 aa, synthetic construct; identical to SEQ ID NO: 367

SEQ ID NO: 374 - protein, 104 aa, synthetic construct
EIVLTQSPAIMSASPGERVTMTCSASSGVNYMHWYQQKPGTSPRRWIYDTSKLASGVPARFSGSGSGTDYSLTISSMEPEDAATYYCHQRGSYTFGGGTKLEIK

SEQ ID NO: 375 - protein, 120 aa, synthetic construct
QVQLQESGPGLVKPSQTLSLTCTVSGGSISTSGMGVGWIRQHPGKGLEWIGHIWWDDDKRYNPALKSRVTISVDTSKNQFSLKLSSVTAADTAVYYCARMELWSYYFDYWGQGTLVTVSS

SEQ ID NO: 376 - protein, 106 aa, synthetic construct
EIVLTQSPATLSLSPGERATLSCSASSSVSYMHWYQQKPGQAPRLLIYDTSKLASGIPARFSGSGSGTDFTLTISSLEPEDVAVYYCFQGSVYPFTFGQGTKLEIK

SEQ ID NO: 377 - protein, 121 aa, synthetic construct
EVQLVESGGGLVQPGGSLRLSCAASGFTFSSSWMNWVRQAPGKGLEWVGRIYPGDGDTNYNVKFKGRFTISRDDSKNSLYLQMNSLKTEDTAVYYCARSGFITTVRDFDYWGQGTLVTVSS

SEQ ID NO: 378 - protein, 111 aa, synthetic construct
EIVLTQSPDFQSVTPKEKVTITCRASESVDTFGISFMNWFQQKPDQSPKLLIHEASNQGSGVPSRFSGSGSGTDFTLTINSLEAEDAATYYCQQSKEVPFTFGGGTKVEIK

SEQ ID NO: 379 - protein, 120 aa, synthetic construct
QVQLQESGPGLVKPSQTLSLTCTVSGGSISTSTMGVGWIRQHPGKGLEWIGFIWWDDDKRYNPNLKSRVTMSVDTSKNQFSLKLSSVTAADTAVYYCARMELWSYYFDYWGQGTLVTVSS

SEQ ID NO: 380 - protein, 106 aa, synthetic construct
EIVLTQSPATLSLSPGERATLSCSASSSVGYMHWYQQKPGQAPRLLIYDTSKLASGIPARFSGSGSGTDFTLTISSLEPEDFAVYYCFQGSVYPFTFGQGTKLEIK

SEQ ID NO: 381 - protein, 119 aa, synthetic construct
QVQLQESGPGLVKPSQTLSLTCTVSGGSIASGMGVSWIRQHPGKGLEWIGHIWWDDDKRYNPALKSRVTISVDTSKNQFSLKLSSVTAADTAVYYCARMELWSYYFDPWGQGTLVTVSS

SEQ ID NO: 382 - protein, 106 aa, synthetic construct; identical to SEQ ID NO: 380

SEQ ID NO: 383 - protein, 120 aa, synthetic construct
QVQLQESGPGLVKPSQTLSLTCTVSGGSISTSTMGVGWIRQHPGKGLEWIGFIWWDDDKRYNPNLKSRVTMSVDTSKNQFSLKLSSVTAADTAVYYCARMELWSYYFDPWGQGTLVTVSS

SEQ ID NO: 384 - protein, 106 aa, synthetic construct
EIVLTQSPATLSLSPGERATLSCSASSSVGYMHWYQQKPGQAPRLLIYDTSKLAFGIPARFSGSGSGTDFTLTISSLEPEDFAVYYCFQGSVYPFTFGQGTKLEIK

SEQ ID NO: 385 - protein, 250 aa, synthetic construct
DIQLTQSPASLAVSLGQRATISCKASQSVDYDGDSYLNWYQQIPGQPPKLLIYDASNLVSGIPPRFSGSGSGTDFTLNIHPVEKVDAATYHCQQSTEDPWTFGGGTKLEIKGGGGSGGGGSGGGGSQVQLQQSGAELVRPGSSVKISCKASGYAFSSYWMNWVKQRPGQGLEWIGQIWPGDGDTNYNGKFKGKATLTADESSSTAYMQLSSLASEDSAVYFCARRETTTVGRYYYAMDYWGQGTTVTVSS

SEQ ID NO: 386 - protein, 253 aa, synthetic construct
DIVMTQSPATLSLSPGERATLSCRSSKSLQNVNGNTYLYWFQQKPGQSPQLLIYRMSNLNSGVPDRFSGSGSGTEFTLTISSLEPEDFAVYYCMQHLEYPITFGAGTKLEIKGGGGSGGGGSGGGGSGGGGSEVQLVESGGGLVKPGGSLKLSCAASGYTFTSYVMHWVRQAPGKGLEWIGYINPYNDGTKYNEKFQGRVTISSDKSISTAYMELSSLRSEDTAMYYCARGTYYYGTRVFDYWGQGTLVTVSS

SEQ ID NO: 387 - protein, 227 aa, synthetic construct
QVQLQQSGAELVRPGSSVKISCKASGYAFSSYWMNWVKQRPGQGLEWIGQIWPGDGDTNYNGKFKGKATLTADESSSTAYMQLSSLASEDSAVYFCARRETTTVGRYYYAMDYWGQGTTVTVSSASTKGPSVFPLAPSSKSTSGGTAALGCLVKDYFPEPVTVSWNSGALTSGVHTFPAVLQSSGLYSLSSVVTVPSSSLGTQTYICNVNHKPSNTKVDKKVEPKSC

SEQ ID NO: 388 - protein, 218 aa, synthetic construct
DIQLTQSPASLAVSLGQRATISCKASQSVDYDGDSYLNWYQQIPGQPPKLLIYDASNLVSGIPPRFSGSGSGTDFTLNIHPVEKVDAATYHCQQSTEDPWTFGGGTKLEIKRTVAAPSVFIFPPSDEQLKSGTASVVCLLNNFYPREAKVQWKVDNALQSGNSQESVTEQDSKDSTYSLSSTLTLSKADYEKHKVYACEVTHQGLSSPVTKSFNRGEC

SEQ ID NO: 389 - protein, 223 aa, synthetic construct
QVQLVQPGAEVVKPGASVKLSCKTSGYTFTSNWMHWVKQAPGQGLEWIGEIDPSDSYTNYNQNFQGKAKLTVDKSTSTAYMEVSSLRSDDTAVYYCARGSNPYYYAMDYWGQGTSVTVSSASTKGPSVFPLAPSSKSTSGGTAALGCLVKDYFPEPVTVSWNSGALTSGVHTFPAVLQSSGLYSLSSVVTVPSSSLGTQTYICNVNHKPSNTKVDKKVEPKSC

SEQ ID NO: 390 - protein, 211 aa, synthetic construct
EIVLTQSPAIMSASPGERVTMTCSASSGVNYMHWYQQKPGTSPRRWIYDTSKLASGVPARFSGSGSGTSYSLTISSMEPEDAATYYCHQRGSYTFGGGTKLEIKRTVAAPSVFIFPPSDEQLKSGTASVVCLLNNFYPREAKVQWKVDNALQSGNSQESVTEQDSKDSTYSLSSTLTLSKADYEKHKVYACEVTHQGLSSPVTKSFNRGEC

SEQ ID NO: 391 - protein, 223 aa, synthetic construct
QVQLVQSGAEVKKPGASVKVSCKASGYTFTSNWMHWVRQAPGQGLEWIGEIDPSDSYTNYNQKFKGRATLTVDKSTSTAYMELSSLRSEDTAVYYCARGSNPYYYAMDYWGQGTTVTVSSASTKGPSVFPLAPSSKSTSGGTAALGCLVKDYFPEPVTVSWNSGALTSGVHTFPAVLQSSGLYSLSSVVTVPSSSLGTQTYICNVNHKPSNTKVDKKVEPKSC

SEQ ID NO: 392 - protein, 211 aa, synthetic construct
EIVLTQSPATLSLSPGERATLSCSASSGVNYMHWYQQKPGQAPRRWIYDTSKLASGIPARFSGSGSGTDFTLTISSLEPEDFAVYYCHQRGSYTFGGGTKVEIKRTVAAPSVFIFPPSDEQLKSGTASVVCLLNNFYPREAKVQWKVDNALQSGNSQESVTEQDSKDSTYSLSSTLTLSKADYEKHKVYACEVTHQGLSSPVTKSFNRGEC

SEQ ID NO: 393 - protein, 224 aa, synthetic construct
EVQLVESGGGLVKPGGSLKLSCAASGYTFTSYVMHWVRQAPGKGLEWIGYINPYNDGTKYNEKFQGRVTISSDKSISTAYMELSSLRSEDTAMYYCARGTYYYGTRVFDYWGQGTLVTVSSASTKGPSVFPLAPSSKSTSGGTAALGCLVKDYFPEPVTVSWNSGALTSGVHTFPAVLQSSGLYSLSSVVTVPSSSLGTQTYICNVNHKPSNTKVDKKVEPKSC

SEQ ID NO: 394 - protein, 219 aa, synthetic construct
DIVMTQSPATLSLSPGERATLSCRSSKSLQNVNGNTYLYWFQQKPGQSPQLLIYRMSNLNSGVPDRFSGSGSGTEFTLTISSLEPEDFAVYYCMQHLEYPITFGAGTKLEIKRTVAAPSVFIFPPSDEQLKSGTASVVCLLNNFYPREAKVQWKVDNALQSGNSQESVTEQDSKDSTYSLSSTLTLSKADYEKHKVYACEVTHQGLSSPVTKSFNRGEC

SEQ ID NO: 395 - protein, 223 aa, synthetic construct; identical to SEQ ID NO: 389

SEQ ID NO: 396 - protein, 211 aa, synthetic construct
EIVLTQSPAIMSASPGERVTMTCSASSGVNYMHWYQQKPGTSPRRWIYDTSKLASGVPARFSGSGSGTDYSLTISSMEPEDAATYYCHQRGSYTFGGGTKLEIKRTVAAPSVFIFPPSDEQLKSGTASVVCLLNNFYPREAKVQWKVDNALQSGNSQESVTEQDSKDSTYSLSSTLTLSKADYEKHKVYACEVTHQGLSSPVTKSFNRGEC

SEQ ID NO: 397 - protein, 223 aa, synthetic construct
QVQLQESGPGLVKPSQTLSLTCTVSGGSISTSGMGVGWIRQHPGKGLEWIGHIWWDDDKRYNPALKSRVTISVDTSKNQFSLKLSSVTAADTAVYYCARMELWSYYFDYWGQGTLVTVSSASTKGPSVFPLAPSSKSTSGGTAALGCLVKDYFPEPVTVSWNSGALTSGVHTFPAVLQSSGLYSLSSVVTVPSSSLGTQTYICNVNHKPSNTKVDKKVEPKSC

SEQ ID NO: 398 - protein, 213 aa, synthetic construct
EIVLTQSPATLSLSPGERATLSCSASSSVSYMHWYQQKPGQAPRLLIYDTSKLASGIPARFSGSGSGTDFTLTISSLEPEDVAVYYCFQGSVYPFTFGQGTKLEIKRTVAAPSVFIFPPSDEQLKSGTASVVCLLNNFYPREAKVQWKVDNALQSGNSQESVTEQDSKDSTYSLSSTLTLSKADYEKHKVYACEVTHQGLSSPVTKSFNRGEC

SEQ ID NO: 399 - protein, 224 aa, synthetic construct
EVQLVESGGGLVQPGGSLRLSCAASGFTFSSSWMNWVRQAPGKGLEWVGRIYPGDGDTNYNVKFKGRFTISRDDSKNSLYLQMNSLKTEDTAVYYCARSGFITTVRDFDYWGQGTLVTVSSASTKGPSVFPLAPSSKSTSGGTAALGCLVKDYFPEPVTVSWNSGALTSGVHTFPAVLQSSGLYSLSSVVTVPSSSLGTQTYICNVNHKPSNTKVDKKVEPKSC

SEQ ID NO: 400 - protein, 218 aa, synthetic construct
EIVLTQSPDFQSVTPKEKVTITCRASESVDTFGISFMNWFQQKPDQSPKLLIHEASNQGSGVPSRFSGSGSGTDFTLTINSLEAEDAATYYCQQSKEVPFTFGGGTKVEIKRTVAAPSVFIFPPSDEQLKSGTASVVCLLNNFYPREAKVQWKVDNALQSGNSQESVTEQDSKDSTYSLSSTLTLSKADYEKHKVYACEVTHQGLSSPVTKSFNRGEC

SEQ ID NO: 401 - protein, 223 aa, synthetic construct
QVQLQESGPGLVKPSQTLSLTCTVSGGSISTSTMGVGWIRQHPGKGLEWIGFIWWDDDKRYNPNLKSRVTMSVDTSKNQFSLKLSSVTAADTAVYYCARMELWSYYFDYWGQGTLVTVSSASTKGPSVFPLAPSSKSTSGGTAALGCLVKDYFPEPVTVSWNSGALTSGVHTFPAVLQSSGLYSLSSVVTVPSSSLGTQTYICNVNHKPSNTKVDKKVEPKSC

SEQ ID NO: 402 - protein, 213 aa, synthetic construct
EIVLTQSPATLSLSPGERATLSCSASSSVGYMHWYQQKPGQAPRLLIYDTSKLASGIPARFSGSGSGTDFTLTISSLEPEDFAVYYCFQGSVYPFTFGQGTKLEIKRTVAAPSVFIFPPSDEQLKSGTASVVCLLNNFYPREAKVQWKVDNALQSGNSQESVTEQDSKDSTYSLSSTLTLSKADYEKHKVYACEVTHQGLSSPVTKSFNRGEC

SEQ ID NO: 403 - protein, 222 aa, synthetic construct
QVQLQESGPGLVKPSQTLSLTCTVSGGSIASGMGVSWIRQHPGKGLEWIGHIWWDDDKRYNPALKSRVTISVDTSKNQFSLKLSSVTAADTAVYYCARMELWSYYFDPWGQGTLVTVSSASTKGPSVFPLAPSSKSTSGGTAALGCLVKDYFPEPVTVSWNSGALTSGVHTFPAVLQSSGLYSLSSVVTVPSSSLGTQTYICNVNHKPSNTKVDKKVEPKSC

SEQ ID NO: 404 - protein, 213 aa, synthetic construct; identical to SEQ ID NO: 402

SEQ ID NO: 405 - protein, 223 aa, synthetic construct
QVQLQESGPGLVKPSQTLSLTCTVSGGSISTSTMGVGWIRQHPGKGLEWIGFIWWDDDKRYNPNLKSRVTMSVDTSKNQFSLKLSSVTAADTAVYYCARMELWSYYFDPWGQGTLVTVSSASTKGPSVFPLAPSSKSTSGGTAALGCLVKDYFPEPVTVSWNSGALTSGVHTFPAVLQSSGLYSLSSVVTVPSSSLGTQTYICNVNHKPSNTKVDKKVEPKSC

SEQ ID NO: 406 - protein, 213 aa, synthetic construct
EIVLTQSPATLSLSPGERATLSCSASSSVGYMHWYQQKPGQAPRLLIYDTSKLAFGIPARFSGSGSGTDFTLTISSLEPEDFAVYYCFQGSVYPFTFGQGTKLEIKRTVAAPSVFIFPPSDEQLKSGTASVVCLLNNFYPREAKVQWKVDNALQSGNSQESVTEQDSKDSTYSLSSTLTLSKADYEKHKVYACEVTHQGLSSPVTKSFNRGEC

SEQ ID NO: 407 - protein, 218 aa, synthetic construct; identical to SEQ ID NO: 388

SEQ ID NO: 408 - protein, 218 aa, synthetic construct; identical to SEQ ID NO: 388

SEQ ID NO: 409 - protein, 218 aa, synthetic construct; identical to SEQ ID NO: 388

SEQ ID NO: 410 - protein, 218 aa, synthetic construct; identical to SEQ ID NO: 388

SEQ ID NO: 411 - protein, 211 aa, synthetic construct; identical to SEQ ID NO: 392

SEQ ID NO: 412 - protein, 211 aa, synthetic construct; identical to SEQ ID NO: 392

SEQ ID NO: 413 - protein, 211 aa, synthetic construct; identical to SEQ ID NO: 392

SEQ ID NO: 414 - protein, 211 aa, synthetic construct; identical to SEQ ID NO: 392

SEQ ID NO: 415 - protein, 218 aa, synthetic construct; identical to SEQ ID NO: 388

SEQ ID NO: 416 - protein, 472 aa, synthetic construct
EVQLVESGGGLVQPGGSLKLSCAASGFTFNKYAMNWVRQAPGKGLEWVARIRSKYNNYATYYADSVKDRFTISRDDSKNTAYLQMNNLKTEDTAVYYCVRHGNFGNSYISYWAYWGQGTLVTVSSGGGGSGGGGSGGGGSQTVVTQEPSLTVSPGGTVTLTCGSSTGAVTSGNYPNWVQQKPGQAPRGLIGGTKFLAPGTPARFSGSLLGGKAALTLSGVQPEDEAEYYCVLWYSNRWVFGGGTKLTVLGGGGSDIQLTQSPASLAVSLGQRATISCKASQSVDYDGDSYLNWYQQIPGQPPKLLIYDASNLVSGIPPRFSGSGSGTDFTLNIHPVEKVDAATYHCQQSTEDPWTFGGGTKLEIKRTVAAPSVFIFPPSDEQLKSGTASVVCLLNNFYPREAKVQWKVDNALQSGNSQESVTEQDSKDSTYSLSSTLTLSKADYEKHKVYACEVTHQGLSSPVTKSFNRGEC

SEQ ID NO: 417 - protein, 218 aa, synthetic construct; identical to SEQ ID NO: 388

SEQ ID NO: 418 - protein, 464 aa, synthetic construct
QVQLVQSGAEVKKPGSSVKVSCKASGYSFTTYYIHWVRQAPGQGLEWMGWFFPGSGNIKYNEKFKGRVTITADTSTSTAYMELSSLRSEDTAVYYCAGSYYSYDVLDYWGQGTTVTVSSGGGGSGGGGSGGGGSDIQMTQSPSFLSASVGDRVTITCKASQNVGINVVWHQQKPGKAPKALIYSSSHRYSGVPSRFSGSGSGTEFTLTISSLQPEDFATYFCQQFKSYPLTFGQGTKLEIKGGGGSDIQLTQSPASLAVSLGQRATISCKASQSVDYDGDSYLNWYQQIPGQPPKLLIYDASNLVSGIPPRFSGSGSGTDFTLNIHPVEKVDAATYHCQQSTEDPWTFGGGTKLEIKRTVAAPSVFIFPPSDEQLKSGTASVVCLLNNFYPREAKVQWKVDNALQSGNSQESVTEQDSKDSTYSLSSTLTLSKADYEKHKVYACEVTHQGLSSPVTKSFNRGEC

SEQ ID NO: 419 - protein, 218 aa, synthetic construct; identical to SEQ ID NO: 388

SEQ ID NO: 420 - protein, 461 aa, synthetic construct
EVQLVESGGGLVQPGGSLRLSCAASGFTFSNFGMHWVRQAPGKGLEWVSYISSGSSTIYYADTLKGRFTISRDNSKNTLYLQMNSLRAEDTAVYYCARRGEGAMDYWGQGTTVTVSSGGGGSGGGGSGGGGSDNQLTQSPSFLSASVGDRVTITCRASSSVNYIYWYQQKPGKAPKLLIYYTSNLAPGVPSRFSGSGSGNEYTLTISSLQPEDFATYYCQQFTSSPFTFGQGTKLEIKGGGGSDIQLTQSPASLAVSLGQRATISCKASQSVDYDGDSYLNWYQQIPGQPPKLLIYDASNLVSGIPPRFSGSGSGTDFTLNIHPVEKVDAATYHCQQSTEDPWTFGGGTKLEIKRTVAAPSVFIFPPSDEQLKSGTASVVCLLNNFYPREAKVQWKVDNALQSGNSQESVTEQDSKDSTYSLSSTLTLSKADYEKHKVYACEVTHQGLSSPVTKSFNRGEC

SEQ ID NO: 421 - protein, 218 aa, synthetic construct; identical to SEQ ID NO: 388

SEQ ID NO: 422 - protein, 468 aa, synthetic construct
EVQLQQSVADLVRPGASLKLSCTASGFNIKSAYMHWVIQRPDQGPECLGRIDPATGKTKYAPKFQAKATITADTSSNTAYLQLSSLTSEDTAIYYCTRSLNWDYGLDYWGQGTSVTVSSGGGGSGGGGSGGGGSDIVLTQSPASLAVSLGQRATISCRASKSVSILGTHLIHWYQQKPGQPPKLLIYAASNLESGVPARFSGSGSETVFTLNIHPVEEEDAATYFCQQSIEDPWTFGGGTKLGIKGGGGSDIQLTQSPASLAVSLGQRATISCKASQSVDYDGDSYLNWYQQIPGQPPKLLIYDASNLVSGIPPRFSGSGSGTDFTLNIHPVEKVDAATYHCQQSTEDPWTFGGGTKLEIKRTVAAPSVFIFPPSDEQLKSGTASVVCLLNNFYPREAKVQWKVDNALQSGNSQESVTEQDSKDSTYSLSSTLTLSKADYEKHKVYACEVTHQGLSSPVTKSFNRGEC

SEQ ID NO: 423 - protein, 211 aa, synthetic construct; identical to SEQ ID NO: 392

SEQ ID NO: 424 - protein, 465 aa, synthetic construct
EVQLVESGGGLVQPGGSLKLSCAASGFTFNKYAMNWVRQAPGKGLEWVARIRSKYNNYATYYADSVKDRFTISRDDSKNTAYLQMNNLKTEDTAVYYCVRHGNFGNSYISYWAYWGQGTLVTVSSGGGGSGGGGSGGGGSQTVVTQEPSLTVSPGGTVTLTCGSSTGAVTSGNYPNWVQQKPGQAPRGLIGGTKFLAPGTPARFSGSLLGGKAALTLSGVQPEDEAEYYCVLWYSNRWVFGGGTKLTVLGGGGSEIVLTQSPATLSLSPGERATLSCSASSGVNYMHWYQQKPGQAPRRWIYDTSKLASGIPARFSGSGSGTDFTLTISSLEPEDFAVYYCHQRGSYTFGGGTKVEIKRTVAAPSVFIFPPSDEQLKSGTASVVCLLNNFYPREAKVQWKVDNALQSGNSQESVTEQDSKDSTYSLSSTLTLSKADYEKHKVYACEVTHQGLSSPVTKSFNRGEC

SEQ ID NO: 425 - protein, 211 aa, synthetic construct; identical to SEQ ID NO: 392

SEQ ID NO: 426 - protein, 457 aa, synthetic construct
QVQLVQSGAEVKKPGSSVKVSCKASGYSFTTYYIHWVRQAPGQGLEWMGWFFPGSGNIKYNEKFKGRVTITADTSTSTAYMELSSLRSEDTAVYYCAGSYYSYDVLDYWGQGTTVTVSSGGGGSGGGGSGGGGSDIQMTQSPSFLSASVGDRVTITCKASQNVGINVVWHQQKPGKAPKALIYSSSHRYSGVPSRFSGSGSGTEFTLTISSLQPEDFATYFCQQFKSYPLTFGQGTKLEIKGGGGSEIVLTQSPATLSLSPGERATLSCSASSGVNYMHWYQQKPGQAPRRWIYDTSKLASGIPARFSGSGSGTDFTLTISSLEPEDFAVYYCHQRGSYTFGGGTKVEIKRTVAAPSVFIFPPSDEQLKSGTASVVCLLNNFYPREAKVQWKVDNALQSGNSQESVTEQDSKDSTYSLSSTLTLSKADYEKHKVYACEVTHQGLSSPVTKSFNRGEC

SEQ ID NO: 427 - protein, 211 aa, synthetic construct; identical to SEQ ID NO: 392

SEQ ID NO: 428 - protein, 454 aa, synthetic construct
EVQLVESGGGLVQPGGSLRLSCAASGFTFSNFGMHWVRQAPGKGLEWVSYISSGSSTIYYADTLKGRFTISRDNSKNTLYLQMNSLRAEDTAVYYCARRGEGAMDYWGQGTTVTVSSGGGGSGGGGSGGGGSDNQLTQSPSFLSASVGDRVTITCRASSSVNYIYWYQQKPGKAPKLLIYYTSNLAPGVPSRFSGSGSGNEYTLTISSLQPEDFATYYCQQFTSSPFTFGQGTKLEIKGGGGSEIVLTQSPATLSLSPGERATLSCSASSGVNYMHWYQQKPGQAPRRWIYDTSKLASGIPARFSGSGSGTDFTLTISSLEPEDFAVYYCHQRGSYTFGGGTKVEIKRTVAAPSVFIFPPSDEQLKSGTASVVCLLNNFYPREAKVQWKVDNALQSGNSQESVTEQDSKDSTYSLSSTLTLSKADYEKHKVYACEVTHQGLSSPVTKSFNRGEC

SEQ ID NO: 429 - protein, 211 aa, synthetic construct; identical to SEQ ID NO: 392

SEQ ID NO: 430 - protein, 461 aa, synthetic construct
EVQLQQSVADLVRPGASLKLSCTASGFNIKSAYMHWVIQRPDQGPECLGRIDPATGKTKYAPKFQAKATITADTSSNTAYLQLSSLTSEDTAIYYCTRSLNWDYGLDYWGQGTSVTVSSGGGGSGGGGSGGGGSDIVLTQSPASLAVSLGQRATISCRASKSVSILGTHLIHWYQQKPGQPPKLLIYAASNLESGVPARFSGSGSETVFTLNIHPVEEEDAATYFCQQSIEDPWTFGGGTKLGIKGGGGSEIVLTQSPATLSLSPGERATLSCSASSGVNYMHWYQQKPGQAPRRWIYDTSKLASGIPARFSGSGSGTDFTLTISSLEPEDFAVYYCHQRGSYTFGGGTKVEIKRTVAAPSVFIFPPSDEQLKSGTASVVCLLNNFYPREAKVQWKVDNALQSGNSQESVTEQDSKDSTYSLSSTLTLSKADYEKHKVYACEVTHQGLSSPVTKSFNRGEC

SEQ ID NO: 431 - protein, 218 aa, synthetic construct; identical to SEQ ID NO: 388

SEQ ID NO: 432 - protein, 218 aa, synthetic construct; identical to SEQ ID NO: 388

SEQ ID NO: 433 - protein, 466 aa, synthetic construct
EVQLQQSGAELVKPGASVKLSCTASGFNIKDTHMHWVKQRPEQGLEWIGRTDPASGDTKYDPKFQGKATITADTSSNTAYLHLSSLTSEDTAVYYCAHYYRDDVNYAMDYWGQGTTVTVSSGGGGSGGGGSGGGGSDIVMTQSQKFLSTSVGDRVSVTCKARQNVGSNVAWYQQKPGQSPKSLIYSSSFRYSGVPDRFTGSGSGTDFTLTISNVQSEDLAEYFCQQYNTYPYTFGGGTELEIKGGGGSDIQLTQSPASLAVSLGQRATISCKASQSVDYDGDSYLNWYQQIPGQPPKLLIYDASNLVSGIPPRFSGSGSGTDFTLNIHPVEKVDAATYHCQQSTEDPWTFGGGTKLEIKRTVAAPSVFIFPPSDEQLKSGTASVVCLLNNFYPREAKVQWKVDNALQSGNSQESVTEQDSKDSTYSLSSTLTLSKADYEKHKVYACEVTHQGLSSPVTKSFNRGEC

SEQ ID NO: 434 - protein, 218 aa, synthetic construct; identical to SEQ ID NO: 388

SEQ ID NO: 435 - protein, 218 aa, synthetic construct; identical to SEQ ID NO: 388

SEQ ID NO: 436 - protein, 218 aa, synthetic construct; identical to SEQ ID NO: 388

SEQ ID NO: 437 - protein, 218 aa, synthetic construct; identical to SEQ ID NO: 388

SEQ ID NO: 438 - protein, 218 aa, synthetic construct; identical to SEQ ID NO: 388

SEQ ID NO: 439 - protein, 218 aa, synthetic construct; identical to SEQ ID NO: 388

SEQ ID NO: 440 - protein, 211 aa, synthetic construct; identical to SEQ ID NO: 392

SEQ ID NO: 441 - protein, 211 aa, synthetic construct; identical to SEQ ID NO: 392

SEQ ID NO: 442 - protein, 211 aa, synthetic construct; identical to SEQ ID NO: 392

SEQ ID NO: 443 - protein, 211 aa, synthetic construct; identical to SEQ ID NO: 392

SEQ ID NO: 444 - protein, 211 aa, synthetic construct; identical to SEQ ID NO: 392

SEQ ID NO: 445 - protein, 211 aa, synthetic construct; identical to SEQ ID NO: 392

SEQ ID NO: 446 - protein, 218 aa, synthetic construct; identical to SEQ ID NO: 388

SEQ ID NO: 447 - protein, 218 aa, synthetic construct; identical to SEQ ID NO: 388

SEQ ID NO: 448 - protein, 218 aa, synthetic construct; identical to SEQ ID NO: 388

SEQ ID NO: 449 - protein, 218 aa, synthetic construct; identical to SEQ ID NO: 388

SEQ ID NO: 450 - protein, 218 aa, synthetic construct; identical to SEQ ID NO: 388

SEQ ID NO: 451 - protein, 218 aa, synthetic construct; identical to SEQ ID NO: 388

SEQ ID NO: 452 - protein, 211 aa, synthetic construct; identical to SEQ ID NO: 392

SEQ ID NO: 453 - protein, 211 aa, synthetic construct; identical to SEQ ID NO: 392

SEQ ID NO: 454 - protein, 211 aa, synthetic construct; identical to SEQ ID NO: 392

SEQ ID NO: 455 - protein, 211 aa, synthetic construct; identical to SEQ ID NO: 392

SEQ ID NO: 456 - protein, 211 aa, synthetic construct; identical to SEQ ID NO: 392

SEQ ID NO: 457 - protein, 211 aa, synthetic construct; identical to SEQ ID NO: 392

SEQ ID NO: 458 - protein, 504 aa, synthetic construct
DIQLTQSPASLAVSLGQRATISCKASQSVDYDGDSYLNWYQQIPGQPPKLLIYDASNLVSGIPPRFSGSGSGTDFTLNIHPVEKVDAATYHCQQSTEDPWTFGGGTKLEIKGGGGSGGGGSGGGGSQVQLQQSGAELVRPGSSVKISCKASGYAFSSYWMNWVKQRPGQGLEWIGQIWPGDGDTNYNGKFKGKATLTADESSSTAYMQLSSLASEDSAVYFCARRETTTVGRYYYAMDYWGQGTTVTVSSGGGGSDIKLQQSGAELARPGASVKMSCKTSGYTFTRYTMHWVKQRPGQGLEWIGYINPSRGYTNYNQKFKDKATLTTDKSSSTAYMQLSSLTSEDSAVYYCARYYDDHYCLDYWGQGTTLTVSSVEGGSGGSGGSGGSGGVDDIQLTQSPAIMSASPGEKVTMTCRASSSVSYMNWYQQKSGTSPKRWIYDTSKVASGVPYRFSGSGSGTSYSLTISSMEAEDAATYYCQQWSSNPLTFGAGTKLELKHHHHHH

SEQ ID NO: 459 - protein, 219 aa, synthetic construct; identical to SEQ ID NO: 394

SEQ ID NO: 460 - protein, 219 aa, synthetic construct; identical to SEQ ID NO: 394

SEQ ID NO: 461 - protein, 219 aa, synthetic construct; identical to SEQ ID NO: 394

SEQ ID NO: 462 - protein, 219 aa, synthetic construct
DIVMTQSPATLSLSPGERATLSCRSSKSLQNVNGNTYLYWFQQKPGQSPQLLIYRMSNLNSGVPDRFSGSGSGTEFTLTISSLEPEDFAVYYCMQHLEYPITFGAGTKLEIKRTVAAPSVFIFPPSDRKLKSGTASVVCLLNNFYPREAKVQWKVDNALQSGNSQESVTEQDSKDSTYSLSSTLTLSKADYEKHKVYACEVTHQGLSSPVTKSFNRGEC

SEQ ID NO: 463 - protein, 219 aa, synthetic construct; identical to SEQ ID NO: 462

SEQ ID NO: 464 - protein, 219 aa, synthetic construct; identical to SEQ ID NO: 462

SEQ ID NO: 465 - protein, 219 aa, synthetic construct; identical to SEQ ID NO: 462

SEQ ID NO: 466 - protein, 218 aa, synthetic construct
DIQLTQSPASLAVSLGQRATISCKASQSVDYDGDSYLNWYQQIPGQPPKLLIYDASNLVSGIPPRFSGSGSGTDFTLNIHPVEKVDAATYHCQQSTEDPWTFGGGTKLEIKRTVAAPSVFIFPPSDRKLKSGTASVVCLLNNFYPREAKVQWKVDNALQSGNSQESVTEQDSKDSTYSLSSTLTLSKADYEKHKVYACEVTHQGLSSPVTKSFNRGEC

SEQ ID NO: 467 - protein, 218 aa, synthetic construct; identical to SEQ ID NO: 466

SEQ ID NO: 468 - protein, 218 aa, synthetic construct; identical to SEQ ID NO: 466

SEQ ID NO: 469 - protein, 218 aa, synthetic construct; identical to SEQ ID NO: 466

SEQ ID NO: 470 - protein, 219 aa, synthetic construct; identical to SEQ ID NO: 462

SEQ ID NO: 471 - protein, 219 aa, synthetic construct; identical to SEQ ID NO: 462

SEQ ID NO: 472 - protein, 219 aa, synthetic construct; identical to SEQ ID NO: 462

SEQ ID NO: 473 - protein, 219 aa, synthetic construct; identical to SEQ ID NO: 462

SEQ ID NO: 474 - protein, 218 aa, synthetic construct; identical to SEQ ID NO: 466

SEQ ID NO: 475 - protein, 218 aa, synthetic construct; identical to SEQ ID NO: 466

SEQ ID NO: 476 - protein, 218 aa, synthetic construct; identical to SEQ ID NO: 466

SEQ ID NO: 477 - protein, 218 aa, synthetic construct; identical to SEQ ID NO: 466

SEQ ID NO: 478 - protein, 219 aa, synthetic construct; identical to SEQ ID NO: 462

SEQ ID NO: 479 - protein, 219 aa, synthetic construct; identical to SEQ ID NO: 462

SEQ ID NO: 480 - protein, 219 aa, synthetic construct; identical to SEQ ID NO: 462

SEQ ID NO: 481 - protein, 219 aa, synthetic construct; identical to SEQ ID NO: 462

SEQ ID NO: 482 - protein, 218 aa, synthetic construct; identical to SEQ ID NO: 466

SEQ ID NO: 483 - protein, 218 aa, synthetic construct; identical to SEQ ID NO: 466

SEQ ID NO: 484 - protein, 218 aa, synthetic construct; identical to SEQ ID NO: 466

SEQ ID NO: 485 - protein, 218 aa, synthetic construct; identical to SEQ ID NO: 466

SEQ ID NO: 486 - protein, 218 aa, synthetic construct; identical to SEQ ID NO: 388

SEQ ID NO: 487 - protein, 464 aa, synthetic construct
QVQLVQSGAEVKKPGSSVKVSCKASGYSFTTYYIHWVRQAPGQCLEWMGWFFPGSGNIKYNEKFKGRVTITADTSTSTAYMELSSLRSEDTAVYYCAGSYYSYDVLDYWGQGTTVTVSSGGGGSGGGGSGGGGSDIQMTQSPSFLSASVGDRVTITCKASQNVGINVVWHQQKPGKAPKALIYSSSHRYSGVPSRFSGSGSGTEFTLTISSLQPEDFATYFCQQFKSYPLTFGCGTKLEIKGGGGSDIQLTQSPASLAVSLGQRATISCKASQSVDYDGDSYLNWYQQIPGQPPKLLIYDASNLVSGIPPRFSGSGSGTDFTLNIHPVEKVDAATYHCQQSTEDPWTFGGGTKLEIKRTVAAPSVFIFPPSDEQLKSGTASVVCLLNNFYPREAKVQWKVDNALQSGNSQESVTEQDSKDSTYSLSSTLTLSKADYEKHKVYACEVTHQGLSSPVTKSFNRGEC

SEQ ID NO: 488 - protein, 218 aa, synthetic construct; identical to SEQ ID NO: 388

SEQ ID NO: 489 - protein, 464 aa, synthetic construct
DIQMTQSPSFLSASVGDRVTITCKASQNVGINVVWHQQKPGKAPKALIYSSSHRYSGVPSRFSGSGSGTEFTLTISSLQPEDFATYFCQQFKSYPLTFGQGTKLEIKGGGGSGGGGSGGGGSQVQLVQSGAEVKKPGSSVKVSCKASGYSFTTYYIHWVRQAPGQGLEWMGWFFPGSGNIKYNEKFKGRVTITADTSTSTAYMELSSLRSEDTAVYYCAGSYYSYDVLDYWGQGTTVTVSSGGGGSDIQLTQSPASLAVSLGQRATISCKASQSVDYDGDSYLNWYQQIPGQPPKLLIYDASNLVSGIPPRFSGSGSGTDFTLNIHPVEKVDAATYHCQQSTEDPWTFGGGTKLEIKRTVAAPSVFIFPPSDEQLKSGTASVVCLLNNFYPREAKVQWKVDNALQSGNSQESVTEQDSKDSTYSLSSTLTLSKADYEKHKVYACEVTHQGLSSPVTKSFNRGEC

SEQ ID NO: 490 - protein, 218 aa, synthetic construct; identical to SEQ ID NO: 388

SEQ ID NO: 491 - protein, 464 aa, synthetic construct
DIQMTQSPSFLSASVGDRVTITCKASQNVGINVVWHQQKPGKAPKALIYSSSHRYSGVPSRFSGSGSGTEFTLTISSLQPEDFATYFCQQFKSYPLTFGCGTKLEIKGGGGSGGGGSGGGGSQVQLVQSGAEVKKPGSSVKVSCKASGYSFTTYYIHWVRQAPGQCLEWMGWFFPGSGNIKYNEKFKGRVTITADTSTSTAYMELSSLRSEDTAVYYCAGSYYSYDVLDYWGQGTTVTVSSGGGGSDIQLTQSPASLAVSLGQRATISCKASQSVDYDGDSYLNWYQQIPGQPPKLLIYDASNLVSGIPPRFSGSGSGTDFTLNIHPVEKVDAATYHCQQSTEDPWTFGGGTKLEIKRTVAAPSVFIFPPSDEQLKSGTASVVCLLNNFYPREAKVQWKVDNALQSGNSQESVTEQDSKDSTYSLSSTLTLSKADYEKHKVYACEVTHQGLSSPVTKSFNRGEC

SEQ ID NO: 492 - protein, 219 aa, synthetic construct; identical to SEQ ID NO: 394

SEQ ID NO: 493 - protein, 465 aa, synthetic construct
QVQLVQSGAEVKKPGSSVKVSCKASGYSFTTYYIHWVRQAPGQGLEWMGWFFPGSGNIKYNEKFKGRVTITADTSTSTAYMELSSLRSEDTAVYYCAGSYYSYDVLDYWGQGTTVTVSSGGGGSGGGGSGGGGSDIQMTQSPSFLSASVGDRVTITCKASQNVGINVVWHQQKPGKAPKALIYSSSHRYSGVPSRFSGSGSGTEFTLTISSLQPEDFATYFCQQFKSYPLTFGQGTKLEIKGGGGSDIVMTQSPATLSLSPGERATLSCRSSKSLQNVNGNTYLYWFQQKPGQSPQLLIYRMSNLNSGVPDRFSGSGSGTEFTLTISSLEPEDFAVYYCMQHLEYPITFGAGTKLEIKRTVAAPSVFIFPPSDEQLKSGTASVVCLLNNFYPREAKVQWKVDNALQSGNSQESVTEQDSKDSTYSLSSTLTLSKADYEKHKVYACEVTHQGLSSPVTKSFNRGEC

SEQ ID NO: 494 - protein, 219 aa, synthetic construct; identical to SEQ ID NO: 394

SEQ ID NO: 495 - protein, 465 aa, synthetic construct
QVQLVQSGAEVKKPGSSVKVSCKASGYSFTTYYIHWVRQAPGQCLEWMGWFFPGSGNIKYNEKFKGRVTITADTSTSTAYMELSSLRSEDTAVYYCAGSYYSYDVLDYWGQGTTVTVSSGGGGSGGGGSGGGGSDIQMTQSPSFLSASVGDRVTITCKASQNVGINVVWHQQKPGKAPKALIYSSSHRYSGVPSRFSGSGSGTEFTLTISSLQPEDFATYFCQQFKSYPLTFGCGTKLEIKGGGGSDIVMTQSPATLSLSPGERATLSCRSSKSLQNVNGNTYLYWFQQKPGQSPQLLIYRMSNLNSGVPDRFSGSGSGTEFTLTISSLEPEDFAVYYCMQHLEYPITFGAGTKLEIKRTVAAPSVFIFPPSDEQLKSGTASVVCLLNNFYPREAKVQWKVDNALQSGNSQESVTEQDSKDSTYSLSSTLTLSKADYEKHKVYACEVTHQGLSSPVTKSFNRGEC

SEQ ID NO: 496 - protein, 219 aa, synthetic construct; identical to SEQ ID NO: 394

SEQ ID NO: 497 - protein, 465 aa, synthetic construct
DIQMTQSPSFLSASVGDRVTITCKASQNVGINVVWHQQKPGKAPKALIYSSSHRYSGVPSRFSGSGSGTEFTLTISSLQPEDFATYFCQQFKSYPLTFGQGTKLEIKGGGGSGGGGSGGGGSQVQLVQSGAEVKKPGSSVKVSCKASGYSFTTYYIHWVRQAPGQGLEWMGWFFPGSGNIKYNEKFKGRVTITADTSTSTAYMELSSLRSEDTAVYYCAGSYYSYDVLDYWGQGTTVTVSSGGGGSDIVMTQSPATLSLSPGERATLSCRSSKSLQNVNGNTYLYWFQQKPGQSPQLLIYRMSNLNSGVPDRFSGSGSGTEFTLTISSLEPEDFAVYYCMQHLEYPITFGAGTKLEIKRTVAAPSVFIFPPSDEQLKSGTASVVCLLNNFYPREAKVQWKVDNALQSGNSQESVTEQDSKDSTYSLSSTLTLSKADYEKHKVYACEVTHQGLSSPVTKSFNRGEC

SEQ ID NO: 498 - protein, 219 aa, synthetic construct; identical to SEQ ID NO: 394

SEQ ID NO: 499 - protein, 465 aa, synthetic construct
DIQMTQSPSFLSASVGDRVTITCKASQNVGINVVWHQQKPGKAPKALIYSSSHRYSGVPSRFSGSGSGTEFTLTISSLQPEDFATYFCQQFKSYPLTFGCGTKLEIKGGGGSGGGGSGGGGSQVQLVQSGAEVKKPGSSVKVSCKASGYSFTTYYIHWVRQAPGQCLEWMGWFFPGSGNIKYNEKFKGRVTITADTSTSTAYMELSSLRSEDTAVYYCAGSYYSYDVLDYWGQGTTVTVSSGGGGSDIVMTQSPATLSLSPGERATLSCRSSKSLQNVNGNTYLYWFQQKPGQSPQLLIYRMSNLNSGVPDRFSGSGSGTEFTLTISSLEPEDFAVYYCMQHLEYPITFGAGTKLEIKRTVAAPSVFIFPPSDEQLKSGTASVVCLLNNFYPREAKVQWKVDNALQSGNSQESVTEQDSKDSTYSLSSTLTLSKADYEKHKVYACEVTHQGLSSPVTKSFNRGEC

SEQ ID NO: 500 - protein, 219 aa, synthetic construct; identical to SEQ ID NO: 394

SEQ ID NO: 501 - protein, 473 aa, synthetic construct
EVQLVESGGGLVQPGGSLKLSCAASGFTFNKYAMNWVRQAPGKGLEWVARIRSKYNNYATYYADSVKDRFTISRDDSKNTAYLQMNNLKTEDTAVYYCVRHGNFGNSYISYWAYWGQGTLVTVSSGGGGSGGGGSGGGGSQTVVTQEPSLTVSPGGTVTLTCGSSTGAVTSGNYPNWVQQKPGQAPRGLIGGTKFLAPGTPARFSGSLLGGKAALTLSGVQPEDEAEYYCVLWYSNRWVFGGGTKLTVLGGGGSDIVMTQSPATLSLSPGERATLSCRSSKSLQNVNGNTYLYWFQQKPGQSPQLLIYRMSNLNSGVPDRFSGSGSGTEFTLTISSLEPEDFAVYYCMQHLEYPITFGAGTKLEIKRTVAAPSVFIFPPSDEQLKSGTASVVCLLNNFYPREAKVQWKVDNALQSGNSQESVTEQDSKDSTYSLSSTLTLSKADYEKHKVYACEVTHQGLSSPVTKSFNRGEC

SEQ ID NO: 502 - protein, 454 aa, synthetic construct
QVQLQQSGAELVRPGSSVKISCKASGYAFSSYWMNWVKQRPGQGLEWIGQIWPGDGDTNYNGKFKGKATLTADESSSTAYMQLSSLASEDSAVYFCARRETTTVGRYYYAMDYWGQGTTVTVSSASTKGPSVFPLAPSSKSTSGGTAALGCLVKDYFPEPVTVSWNSGALTSGVHTFPAVLQSSGLYSLSSVVTVPSSSLGTQTYICNVNHKPSNTKVDKKVEPKSCDKTHTCPPCPAPEAAGGPSVFLFPPKPKDTLMISRTPEVTCVVVDVSHEDPEVKFNWYVDGVEVHNAKTKPREEQYNSTYRVVSVLTVLHQDWLNGKEYKCKVSNKALGAPIEKTISKAKGQPREPQVCTLPPSRDELTKNQVSLSCAVKGFYPSDIAVEWESNGQPENNYKTTPPVLDSDGSFFLVSKLTVDKSRWQQGNVFSCSVMHEALHNRFTQKSLSLSPGK

SEQ ID NO: 503 - protein, 454 aa, synthetic construct; identical to SEQ ID NO: 502

SEQ ID NO: 504 - protein, 454 aa, synthetic construct; identical to SEQ ID NO: 502

SEQ ID NO: 505 - protein, 454 aa, synthetic construct; identical to SEQ ID NO: 502

SEQ ID NO: 506 - protein, 450 aa, synthetic construct
QVQLVQSGAEVKKPGASVKVSCKASGYTFTSNWMHWVRQAPGQGLEWIGEIDPSDSYTNYNQKFKGRATLTVDKSTSTAYMELSSLRSEDTAVYYCARGSNPYYYAMDYWGQGTTVTVSSASTKGPSVFPLAPSSKSTSGGTAALGCLVKDYFPEPVTVSWNSGALTSGVHTFPAVLQSSGLYSLSSVVTVPSSSLGTQTYICNVNHKPSNTKVDKKVEPKSCDKTHTCPPCPAPEAAGGPSVFLFPPKPKDTLMISRTPEVTCVVVDVSHEDPEVKFNWYVDGVEVHNAKTKPREEQYNSTYRVVSVLTVLHQDWLNGKEYKCKVSNKALGAPIEKTISKAKGQPREPQVCTLPPSRDELTKNQVSLSCAVKGFYPSDIAVEWESNGQPENNYKTTPPVLDSDGSFFLVSKLTVDKSRWQQGNVFSCSVMHEALHNRFTQKSLSLSPGK

SEQ ID NO: 507 - protein, 450 aa, synthetic construct; identical to SEQ ID NO: 506

SEQ ID NO: 508 - protein, 450 aa, synthetic construct; identical to SEQ ID NO: 506

SEQ ID NO: 509 - protein, 450 aa, synthetic construct; identical to SEQ ID NO: 506

SEQ ID NO: 510 - protein, 481 aa, synthetic construct
EVQLVESGGGLVQPGGSLKLSCAASGFTFNKYAMNWVRQAPGKGLEWVARIRSKYNNYATYYADSVKDRFTISRDDSKNTAYLQMNNLKTEDTAVYYCVRHGNFGNSYISYWAYWGQGTLVTVSSGGGGSGGGGSGGGGSQTVVTQEPSLTVSPGGTVTLTCGSSTGAVTSGNYPNWVQQKPGQAPRGLIGGTKFLAPGTPARFSGSLLGGKAALTLSGVQPEDEAEYYCVLWYSNRWVFGGGTKLTVLGGGGSQVQLQQSGAELVRPGSSVKISCKASGYAFSSYWMNWVKQRPGQGLEWIGQIWPGDGDTNYNGKFKGKATLTADESSSTAYMQLSSLASEDSAVYFCARRETTTVGRYYYAMDYWGQGTTVTVSSASTKGPSVFPLAPSSKSTSGGTAALGCLVKDYFPEPVTVSWNSGALTSGVHTFPAVLQSSGLYSLSSVVTVPSSSLGTQTYICNVNHKPSNTKVDKKVEPKSC

SEQ ID NO: 511 - protein, 227 aa, synthetic construct; identical to SEQ ID NO: 387

SEQ ID NO: 512 - protein, 473 aa, synthetic construct
QVQLVQSGAEVKKPGSSVKVSCKASGYSFTTYYIHWVRQAPGQGLEWMGWFFPGSGNIKYNEKFKGRVTITADTSTSTAYMELSSLRSEDTAVYYCAGSYYSYDVLDYWGQGTTVTVSSGGGGSGGGGSGGGGSDIQMTQSPSFLSASVGDRVTITCKASQNVGINVVWHQQKPGKAPKALIYSSSHRYSGVPSRFSGSGSGTEFTLTISSLQPEDFATYFCQQFKSYPLTFGQGTKLEIKGGGGSQVQLQQSGAELVRPGSSVKISCKASGYAFSSYWMNWVKQRPGQGLEWIGQIWPGDGDTNYNGKFKGKATLTADESSSTAYMQLSSLASEDSAVYFCARRETTTVGRYYYAMDYWGQGTTVTVSSASTKGPSVFPLAPSSKSTSGGTAALGCLVKDYFPEPVTVSWNSGALTSGVHTFPAVLQSSGLYSLSSVVTVPSSSLGTQTYICNVNHKPSNTKVDKKVEPKSC

SEQ ID NO: 513 - protein, 227 aa, synthetic construct; identical to SEQ ID NO: 387

SEQ ID NO: 514 - protein, 470 aa, synthetic construct
EVQLVESGGGLVQPGGSLRLSCAASGFTFSNFGMHWVRQAPGKGLEWVSYISSGSSTIYYADTLKGRFTISRDNSKNTLYLQMNSLRAEDTAVYYCARRGEGAMDYWGQGTTVTVSSGGGGSGGGGSGGGGSDNQLTQSPSFLSASVGDRVTITCRASSSVNYIYWYQQKPGKAPKLLIYYTSNLAPGVPSRFSGSGSGNEYTLTISSLQPEDFATYYCQQFTSSPFTFGQGTKLEIKGGGGSQVQLQQSGAELVRPGSSVKISCKASGYAFSSYWMNWVKQRPGQGLEWIGQIWPGDGDTNYNGKFKGKATLTADESSSTAYMQLSSLASEDSAVYFCARRETTTVGRYYYAMDYWGQGTTVTVSSASTKGPSVFPLAPSSKSTSGGTAALGCLVKDYFPEPVTVSWNSGALTSGVHTFPAVLQSSGLYSLSSVVTVPSSSLGTQTYICNVNHKPSNTKVDKKVEPKSC

SEQ ID NO: 515 - protein, 227 aa, synthetic construct; identical to SEQ ID NO: 387

SEQ ID NO: 516 - protein, 477 aa, synthetic construct
EVQLQQSVADLVRPGASLKLSCTASGFNIKSAYMHWVIQRPDQGPECLGRIDPATGKTKYAPKFQAKATITADTSSNTAYLQLSSLTSEDTAIYYCTRSLNWDYGLDYWGQGTSVTVSSGGGGSGGGGSGGGGSDIVLTQSPASLAVSLGQRATISCRASKSVSILGTHLIHWYQQKPGQPPKLLIYAASNLESGVPARFSGSGSETVFTLNIHPVEEEDAATYFCQQSIEDPWTFGGGTKLGIKGGGGSQVQLQQSGAELVRPGSSVKISCKASGYAFSSYWMNWVKQRPGQGLEWIGQIWPGDGDTNYNGKFKGKATLTADESSSTAYMQLSSLASEDSAVYFCARRETTTVGRYYYAMDYWGQGTTVTVSSASTKGPSVFPLAPSSKSTSGGTAALGCLVKDYFPEPVTVSWNSGALTSGVHTFPAVLQSSGLYSLSSVVTVPSSSLGTQTYICNVNHKPSNTKVDKKVEPKSC

SEQ ID NO: 517 - protein, 227 aa, synthetic construct; identical to SEQ ID NO: 387

SEQ ID NO: 518 - protein, 477 aa, synthetic construct
EVQLVESGGGLVQPGGSLKLSCAASGFTFNKYAMNWVRQAPGKGLEWVARIRSKYNNYATYYADSVKDRFTISRDDSKNTAYLQMNNLKTEDTAVYYCVRHGNFGNSYISYWAYWGQGTLVTVSSGGGGSGGGGSGGGGSQTVVTQEPSLTVSPGGTVTLTCGSSTGAVTSGNYPNWVQQKPGQAPRGLIGGTKFLAPGTPARFSGSLLGGKAALTLSGVQPEDEAEYYCVLWYSNRWVFGGGTKLTVLGGGGSQVQLVQSGAEVKKPGASVKVSCKASGYTFTSNWMHWVRQAPGQGLEWIGEIDPSDSYTNYNQKFKGRATLTVDKSTSTAYMELSSLRSEDTAVYYCARGSNPYYYAMDYWGQGTTVTVSSASTKGPSVFPLAPSSKSTSGGTAALGCLVKDYFPEPVTVSWNSGALTSGVHTFPAVLQSSGLYSLSSVVTVPSSSLGTQTYICNVNHKPSNTKVDKKVEPKSC

SEQ ID NO: 519 - protein, 223 aa, synthetic construct; identical to SEQ ID NO: 391

SEQ ID NO: 520 - protein, 469 aa, synthetic construct
QVQLVQSGAEVKKPGSSVKVSCKASGYSFTTYYIHWVRQAPGQGLEWMGWFFPGSGNIKYNEKFKGRVTITADTSTSTAYMELSSLRSEDTAVYYCAGSYYSYDVLDYWGQGTTVTVSSGGGGSGGGGSGGGGSDIQMTQSPSFLSASVGDRVTITCKASQNVGINVVWHQQKPGKAPKALIYSSSHRYSGVPSRFSGSGSGTEFTLTISSLQPEDFATYFCQQFKSYPLTFGQGTKLEIKGGGGSQVQLVQSGAEVKKPGASVKVSCKASGYTFTSNWMHWVRQAPGQGLEWIGEIDPSDSYTNYNQKFKGRATLTVDKSTSTAYMELSSLRSEDTAVYYCARGSNPYYYAMDYWGQGTTVTVSSASTKGPSVFPLAPSSKSTSGGTAALGCLVKDYFPEPVTVSWNSGALTSGVHTFPAVLQSSGLYSLSSVVTVPSSSLGTQTYICNVNHKPSNTKVDKKVEPKSC

SEQ ID NO: 521 - protein, 223 aa, synthetic construct; identical to SEQ ID NO: 391

SEQ ID NO: 522 - protein, 466 aa, synthetic construct
EVQLVESGGGLVQPGGSLRLSCAASGFTFSNFGMHWVRQAPGKGLEWVSYISSGSSTIYYADTLKGRFTISRDNSKNTLYLQMNSLRAEDTAVYYCARRGEGAMDYWGQGTTVTVSSGGGGSGGGGSGGGGSDNQLTQSPSFLSASVGDRVTITCRASSSVNYIYWYQQKPGKAPKLLIYYTSNLAPGVPSRFSGSGSGNEYTLTISSLQPEDFATYYCQQFTSSPFTFGQGTKLEIKGGGGSQVQLVQSGAEVKKPGASVKVSCKASGYTFTSNWMHWVRQAPGQGLEWIGEIDPSDSYTNYNQKFKGRATLTVDKSTSTAYMELSSLRSEDTAVYYCARGSNPYYYAMDYWGQGTTVTVSSASTKGPSVFPLAPSSKSTSGGTAALGCLVKDYFPEPVTVSWNSGALTSGVHTFPAVLQSSGLYSLSSVVTVPSSSLGTQTYICNVNHKPSNTKVDKKVEPKSC

SEQ ID NO: 523 - protein, 223 aa, synthetic construct; identical to SEQ ID NO: 391

SEQ ID NO: 524 - protein, 473 aa, synthetic construct
EVQLQQSVADLVRPGASLKLSCTASGFNIKSAYMHWVIQRPDQGPECLGRIDPATGKTKYAPKFQAKATITADTSSNTAYLQLSSLTSEDTAIYYCTRSLNWDYGLDYWGQGTSVTVSSGGGGSGGGGSGGGGSDIVLTQSPASLAVSLGQRATISCRASKSVSILGTHLIHWYQQKPGQPPKLLIYAASNLESGVPARFSGSGSETVFTLNIHPVEEEDAATYFCQQSIEDPWTFGGGTKLGIKGGGGSQVQLVQSGAEVKKPGASVKVSCKASGYTFTSNWMHWVRQAPGQGLEWIGEIDPSDSYTNYNQKFKGRATLTVDKSTSTAYMELSSLRSEDTAVYYCARGSNPYYYAMDYWGQGTTVTVSSASTKGPSVFPLAPSSKSTSGGTAALGCLVKDYFPEPVTVSWNSGALTSGVHTFPAVLQSSGLYSLSSVVTVPSSSLGTQTYICNVNHKPSNTKVDKKVEPKSC

SEQ ID NO: 525 - protein, 223 aa, synthetic construct; identical to SEQ ID NO: 391

SEQ ID NO: 526 - protein, 454 aa, synthetic construct; identical to SEQ ID NO: 502

SEQ ID NO: 527 - protein, 475 aa, synthetic construct
EVQLQQSGAELVKPGASVKLSCTASGFNIKDTHMHWVKQRPEQGLEWIGRTDPASGDTKYDPKFQGKATITADTSSNTAYLHLSSLTSEDTAVYYCAHYYRDDVNYAMDYWGQGTTVTVSSGGGGSGGGGSGGGGSDIVMTQSQKFLSTSVGDRVSVTCKARQNVGSNVAWYQQKPGQSPKSLIYSSSFRYSGVPDRFTGSGSGTDFTLTISNVQSEDLAEYFCQQYNTYPYTFGGGTELEIKGGGGSQVQLQQSGAELVRPGSSVKISCKASGYAFSSYWMNWVKQRPGQGLEWIGQIWPGDGDTNYNGKFKGKATLTADESSSTAYMQLSSLASEDSAVYFCARRETTTVGRYYYAMDYWGQGTTVTVSSASTKGPSVFPLAPSSKSTSGGTAALGCLVKDYFPEPVTVSWNSGALTSGVHTFPAVLQSSGLYSLSSVVTVPSSSLGTQTYICNVNHKPSNTKVDKKVEPKSC

SEQ ID NO: 528 - protein, 227 aa, synthetic construct; identical to SEQ ID NO: 387

SEQ ID NO: 529 - protein, 452 aa, synthetic construct
QVQLQQSGAELVRPGSSVKISCKASGYAFSSYWMNWVKQRPGQGLEWIGQIWPGDGDTNYNGKFKGKATLTADESSSTAYMQLSSLASEDSAVYFCARRETTTVGRYYYAMDYWGQGTTVTVSSASTKGPSVFPLAPSSKSTSGGTAALGCLVKDYFPEPVTVSWNSGALTSGVHTFPAVLQSSGLYSLSSVVTVPSSSLGTQTYICNVNHKPSNTKVDKKVEPKSCDKTHTCPPCPAPEAAGGPSVFLFPPKPKDTLMISRTPEVTCVVVDVSHEDPEVKFNWYVDGVEVHNAKTKPREEQYNSTYRVVSVLTVLHQDWLNGKEYKCKVSNKALGAPIEKTISKAKGQPREPQVCTLPPSRDELTKNQVSLSCAVKGFYPSDIAVEWESNGQPENNYKTTPPVLDSDGSFFLVSKLTVDKSRWQQGNVFSCSVMHEALHNHYTQKSLSLSP

SEQ ID NO: 530 - protein, 452 aa, synthetic construct; identical to SEQ ID NO: 529

SEQ ID NO: 531 - protein, 452 aa, synthetic construct; identical to SEQ ID NO: 529

SEQ ID NO: 532 - protein, 452 aa, synthetic construct; identical to SEQ ID NO: 529

SEQ ID NO: 533 - protein, 452 aa, synthetic construct; identical to SEQ ID NO: 529

SEQ ID NO: 534 - protein, 452 aa, synthetic construct; identical to SEQ ID NO: 529

SEQ ID NO: 535 - protein, 448 aa, synthetic construct
QVQLVQSGAEVKKPGASVKVSCKASGYTFTSNWMHWVRQAPGQGLEWIGEIDPSDSYTNYNQKFKGRATLTVDKSTSTAYMELSSLRSEDTAVYYCARGSNPYYYAMDYWGQGTTVTVSSASTKGPSVFPLAPSSKSTSGGTAALGCLVKDYFPEPVTVSWNSGALTSGVHTFPAVLQSSGLYSLSSVVTVPSSSLGTQTYICNVNHKPSNTKVDKKVEPKSCDKTHTCPPCPAPEAAGGPSVFLFPPKPKDTLMISRTPEVTCVVVDVSHEDPEVKFNWYVDGVEVHNAKTKPREEQYNSTYRVVSVLTVLHQDWLNGKEYKCKVSNKALGAPIEKTISKAKGQPREPQVCTLPPSRDELTKNQVSLSCAVKGFYPSDIAVEWESNGQPENNYKTTPPVLDSDGSFFLVSKLTVDKSRWQQGNVFSCSVMHEALHNHYTQKSLSLSP

SEQ ID NO: 536 - protein, 448 aa, synthetic construct; identical to SEQ ID NO: 535

SEQ ID NO: 537 - protein, 448 aa, synthetic construct; identical to SEQ ID NO: 535

SEQ ID NO: 538 - protein, 448 aa, synthetic construct; identical to SEQ ID NO: 535

SEQ ID NO: 539 - protein, 448 aa, synthetic construct; identical to SEQ ID NO: 535

SEQ ID NO: 540 - protein, 448 aa, synthetic construct; identical to SEQ ID NO: 535

SEQ ID NO: 541 - protein, 452 aa, synthetic construct; identical to SEQ ID NO: 529

SEQ ID NO: 542 - protein, 452 aa, synthetic construct; identical to SEQ ID NO: 529

SEQ ID NO: 543 - protein, 452 aa, synthetic construct; identical to SEQ ID NO: 529

SEQ ID NO: 544 - protein, 452 aa, synthetic construct; identical to SEQ ID NO: 529

SEQ ID NO: 545 - protein, 452 aa, synthetic construct; identical to SEQ ID NO: 529

SEQ ID NO: 546 - protein, 452 aa, synthetic construct; identical to SEQ ID NO: 529

SEQ ID NO: 547 - protein, 448 aa, synthetic construct; identical to SEQ ID NO: 535

SEQ ID NO: 548 - protein, 448 aa, synthetic construct; identical to SEQ ID NO: 535

SEQ ID NO: 549 - protein, 448 aa, synthetic construct; identical to SEQ ID NO: 535

SEQ ID NO: 550 - protein, 448 aa, synthetic construct; identical to SEQ ID NO: 535

SEQ ID NO: 551 - protein, 448 aa, synthetic construct; identical to SEQ ID NO: 535

SEQ ID NO: 552 - protein, 448 aa, synthetic construct; identical to SEQ ID NO: 535

SEQ ID NO: 553 - protein, 449 aa, synthetic construct
EVQLVESGGGLVKPGGSLKLSCAASGYTFTSYVMHWVRQAPGKGLEWIGYINPYNDGTKYNEKFQGRVTISSDKSISTAYMELSSLRSEDTAMYYCARGTYYYGTRVFDYWGQGTLVTVSSASTKGPSVFPLAPSSKSTSGGTAALGCLVKDYFPEPVTVSWNSGALTSGVHTFPAVLQSSGLYSLSSVVTVPSSSLGTQTYICNVNHKPSNTKVDKKVEPKSCDKTHTCPPCPAPEAAGGPSVFLFPPKPKDTLMISRTPEVTCVVVDVSHEDPEVKFNWYVDGVEVHNAKTKPREEQYGSTYRVVSVLTVLHQDWLNGKEYKCKVSNKALGAPIEKTISKAKGQPREPQVCTLPPSRDELTKNQVSLSCAVKGFYPSDIAVEWESNGQPENNYKTTPPVLDSDGSFFLVSKLTVDKSRWQQGNVFSCSVMHEALHNHYTQKSLSLSP

SEQ ID NO: 554 - protein, 449 aa, synthetic construct; identical to SEQ ID NO: 553

SEQ ID NO: 555 - protein, 449 aa, synthetic construct; identical to SEQ ID NO: 553

SEQ ID NO: 556 - protein, 225 aa, synthetic construct; identical to SEQ ID NO: 154

SEQ ID NO: 557 - protein, 225 aa, synthetic construct; identical to SEQ ID NO: 154

SEQ ID NO: 558 - protein, 225 aa, synthetic construct; identical to SEQ ID NO: 154

SEQ ID NO: 559 - protein, 225 aa, synthetic construct; identical to SEQ ID NO: 154

SEQ ID NO: 560 - protein, 225 aa, synthetic construct; identical to SEQ ID NO: 154

SEQ ID NO: 561 - protein, 225 aa, synthetic construct; identical to SEQ ID NO: 154

SEQ ID NO: 562 - protein, 225 aa, synthetic construct; identical to SEQ ID NO: 154

SEQ ID NO: 563 - protein, 225 aa, synthetic construct; identical to SEQ ID NO: 154

SEQ ID NO: 564 - protein, 225 aa, synthetic construct; identical to SEQ ID NO: 154

SEQ ID NO: 565 - protein, 225 aa, synthetic construct; identical to SEQ ID NO: 154

SEQ ID NO: 566 - protein, 225 aa, synthetic construct; identical to SEQ ID NO: 154

SEQ ID NO: 567 - protein, 225 aa, synthetic construct; identical to SEQ ID NO: 154

SEQ ID NO: 568 - protein, 225 aa, synthetic construct; identical to SEQ ID NO: 154

SEQ ID NO: 569 - protein, 225 aa, synthetic construct; identical to SEQ ID NO: 154

SEQ ID NO: 570 - protein, 225 aa, synthetic construct; identical to SEQ ID NO: 154

SEQ ID NO: 571 - protein, 225 aa, synthetic construct; identical to SEQ ID NO: 154

SEQ ID NO: 572 - protein, 449 aa, synthetic construct
EVQLVESGGGLVKPGGSLKLSCAASGYTFTSYVMHWVRQAPGKGLEWIGYINPYNDGTKYNEKFQGRVTISSDKSISTAYMELSSLRSEDTAMYYCARGTYYYGTRVFDYWGQGTLVTVSSASTKGPSVFPLAPSSKSTSGGTAALGCLVEDYFPEPVTVSWNSGALTSGVHTFPAVLQSSGLYSLSSVVTVPSSSLGTQTYICNVNHKPSNTKVDEKVEPKSCDKTHTCPPCPAPEAAGGPSVFLFPPKPKDTLMISRTPEVTCVVVDVSHEDPEVKFNWYVDGVEVHNAKTKPREEQYGSTYRVVSVLTVLHQDWLNGKEYKCKVSNKALGAPIEKTISKAKGQPREPQVCTLPPSRDELTKNQVSLSCAVKGFYPSDIAVEWESNGQPENNYKTTPPVLDSDGSFFLVSKLTVDKSRWQQGNVFSCSVMHEALHNHYTQKSLSLSP

SEQ ID NO: 573 - protein, 449 aa, synthetic construct; identical to SEQ ID NO: 572

SEQ ID NO: 574 - protein, 449 aa, synthetic construct; identical to SEQ ID NO: 572

SEQ ID NO: 575 - protein, 449 aa, synthetic construct; identical to SEQ ID NO: 572

SEQ ID NO: 576 - protein, 452 aa, synthetic construct
QVQLQQSGAELVRPGSSVKISCKASGYAFSSYWMNWVKQRPGQGLEWIGQIWPGDGDTNYNGKFKGKATLTADESSSTAYMQLSSLASEDSAVYFCARRETTTVGRYYYAMDYWGQGTTVTVSSASTKGPSVFPLAPSSKSTSGGTAALGCLVEDYFPEPVTVSWNSGALTSGVHTFPAVLQSSGLYSLSSVVTVPSSSLGTQTYICNVNHKPSNTKVDEKVEPKSCDKTHTCPPCPAPEAAGGPSVFLFPPKPKDTLMISRTPEVTCVVVDVSHEDPEVKFNWYVDGVEVHNAKTKPREEQYGSTYRVVSVLTVLHQDWLNGKEYKCKVSNKALGAPIEKTISKAKGQPREPQVCTLPPSRDELTKNQVSLSCAVKGFYPSDIAVEWESNGQPENNYKTTPPVLDSDGSFFLVSKLTVDKSRWQQGNVFSCSVMHEALHNHYTQKSLSLSP

SEQ ID NO: 577 - protein, 452 aa, synthetic construct; identical to SEQ ID NO: 576

SEQ ID NO: 578 - protein, 452 aa, synthetic construct; identical to SEQ ID NO: 576

SEQ ID NO: 579 - protein, 452 aa, synthetic construct; identical to SEQ ID NO: 576

SEQ ID NO: 580 - protein, 225 aa, synthetic construct; identical to SEQ ID NO: 154

SEQ ID NO: 581 - protein, 225 aa, synthetic construct; identical to SEQ ID NO: 154

SEQ ID NO: 582 - protein, 225 aa, synthetic construct; identical to SEQ ID NO: 154

SEQ ID NO: 583 - protein, 487 aa, synthetic construct
DIVMTQSPATLSLSPGERATLSCRSSKSLQNVNGNTYLYWFQQKPGQSPQLLIYRMSNLNSGVPDRFSGSGSGTEFTLTISSLEPEDFAVYYCMQHLEYPITFGAGTKLEIKGGGGSGGGGSGGGGSGGGGSEVQLVESGGGLVKPGGSLKLSCAASGYTFTSYVMHWVRQAPGKGLEWIGYINPYNDGTKYNEKFQGRVTISSDKSISTAYMELSSLRSEDTAMYYCARGTYYYGTRVFDYWGQGTLVTVSSGGGGSGGGGSKTHTCPPCPAPEAAGGPSVFLFPPKPKDTLMISRTPEVTCVVVDVSHEDPEVKFNWYVDGVEVHNAKTKPREEQYGSTYRVVSVLTVLHQDWLNGKEYKCKVSNKALGAPIEKTISKAKGQPREPQVCTLPPSRDELTKNQVSLSCAVKGFYPSDIAVEWESNGQPENNYKTTPPVLDSDGSFFLVSKLTVDKSRWQQGNVFSCSVMHEALHNHYTQKSLSLSP

SEQ ID NO: 584 - protein, 225 aa, synthetic construct; identical to SEQ ID NO: 154

SEQ ID NO: 585 - protein, 225 aa, synthetic construct; identical to SEQ ID NO: 154

SEQ ID NO: 586 - protein, 225 aa, synthetic construct; identical to SEQ ID NO: 154

SEQ ID NO: 587 - protein, 487 aa, synthetic construct; identical to SEQ ID NO: 583

SEQ ID NO: 588 - protein, 225 aa, synthetic construct; identical to SEQ ID NO: 154

SEQ ID NO: 589 - protein, 225 aa, synthetic construct; identical to SEQ ID NO: 154

SEQ ID NO: 590 - protein, 225 aa, synthetic construct; identical to SEQ ID NO: 154

SEQ ID NO: 591 - protein, 487 aa, synthetic construct; identical to SEQ ID NO: 583

SEQ ID NO: 592 - protein, 225 aa, synthetic construct; identical to SEQ ID NO: 154

SEQ ID NO: 593 - protein, 225 aa, synthetic construct; identical to SEQ ID NO: 154

SEQ ID NO: 594 - protein, 225 aa, synthetic construct; identical to SEQ ID NO: 154

SEQ ID NO: 595 - protein, 225 aa, synthetic construct; identical to SEQ ID NO: 154

SEQ ID NO: 596 - protein, 225 aa, synthetic construct; identical to SEQ ID NO: 154

SEQ ID NO: 597 - protein, 225 aa, synthetic construct; identical to SEQ ID NO: 154

SEQ ID NO: 598 - protein, 225 aa, synthetic construct; identical to SEQ ID NO: 154

SEQ ID NO: 599 - protein, 225 aa, synthetic construct; identical to SEQ ID NO: 154

SEQ ID NO: 600 - protein, 225 aa, synthetic construct; identical to SEQ ID NO: 154

SEQ ID NO: 601 - protein, 225 aa, synthetic construct; identical to SEQ ID NO: 154

SEQ ID NO: 602 - protein, 225 aa, synthetic construct; identical to SEQ ID NO: 154

SEQ ID NO: 603 - protein, 225 aa, synthetic construct; identical to SEQ ID NO: 154

SEQ ID NO: 604 - protein, 225 aa, synthetic construct; identical to SEQ ID NO: 154

SEQ ID NO: 605 - protein, 225 aa, synthetic construct; identical to SEQ ID NO: 154

SEQ ID NO: 606 - protein, 225 aa, synthetic construct; identical to SEQ ID NO: 154

SEQ ID NO: 607 - protein, 225 aa, synthetic construct; identical to SEQ ID NO: 154

SEQ ID NO: 608 - protein, 225 aa, synthetic construct; identical to SEQ ID NO: 154

SEQ ID NO: 609 - protein, 225 aa, synthetic construct; identical to SEQ ID NO: 154

SEQ ID NO: 610 - protein, 225 aa, synthetic construct; identical to SEQ ID NO: 154

SEQ ID NO: 611 - protein, 225 aa, synthetic construct; identical to SEQ ID NO: 154

SEQ ID NO: 612 - protein, 225 aa, synthetic construct; identical to SEQ ID NO: 154

SEQ ID NO: 613 - protein, 225 aa, synthetic construct; identical to SEQ ID NO: 154

SEQ ID NO: 614 - protein, 225 aa, synthetic construct; identical to SEQ ID NO: 154

SEQ ID NO: 615 - protein, 225 aa, synthetic construct; identical to SEQ ID NO: 154

SEQ ID NO: 616 - protein, 225 aa, synthetic construct; identical to SEQ ID NO: 154

SEQ ID NO: 617 - protein, 225 aa, synthetic construct; identical to SEQ ID NO: 154

SEQ ID NO: 618 - protein, 225 aa, synthetic construct; identical to SEQ ID NO: 154

SEQ ID NO: 619 - protein, 225 aa, synthetic construct; identical to SEQ ID NO: 154

SEQ ID NO: 620 - protein, 225 aa, synthetic construct; identical to SEQ ID NO: 154

SEQ ID NO: 621 - protein, 225 aa, synthetic construct; identical to SEQ ID NO: 154

SEQ ID NO: 622 - protein, 225 aa, synthetic construct; identical to SEQ ID NO: 154

SEQ ID NO: 623 - protein, 225 aa, synthetic construct; identical to SEQ ID NO: 154

SEQ ID NO: 624 - protein, 225 aa, synthetic construct; identical to SEQ ID NO: 154

SEQ ID NO: 625 - protein, 225 aa, synthetic construct; identical to SEQ ID NO: 154

SEQ ID NO: 626 - protein, 473 aa, synthetic construct
QVQLVQSGAEVKKPGSSVKVSCKASGYSFTTYYIHWVRQAPGQCLEWMGWFFPGSGNIKYNEKFKGRVTITADTSTSTAYMELSSLRSEDTAVYYCAGSYYSYDVLDYWGQGTTVTVSSGGGGSGGGGSGGGGSDIQMTQSPSFLSASVGDRVTITCKASQNVGINVVWHQQKPGKAPKALIYSSSHRYSGVPSRFSGSGSGTEFTLTISSLQPEDFATYFCQQFKSYPLTFGCGTKLEIKGGGGSQVQLQQSGAELVRPGSSVKISCKASGYAFSSYWMNWVKQRPGQGLEWIGQIWPGDGDTNYNGKFKGKATLTADESSSTAYMQLSSLASEDSAVYFCARRETTTVGRYYYAMDYWGQGTTVTVSSASTKGPSVFPLAPSSKSTSGGTAALGCLVKDYFPEPVTVSWNSGALTSGVHTFPAVLQSSGLYSLSSVVTVPSSSLGTQTYICNVNHKPSNTKVDKKVEPKSC

SEQ ID NO: 627 - protein, 227 aa, synthetic construct; identical to SEQ ID NO: 387

SEQ ID NO: 628 - protein, 473 aa, synthetic construct
DIQMTQSPSFLSASVGDRVTITCKASQNVGINVVWHQQKPGKAPKALIYSSSHRYSGVPSRFSGSGSGTEFTLTISSLQPEDFATYFCQQFKSYPLTFGQGTKLEIKGGGGSGGGGSGGGGSQVQLVQSGAEVKKPGSSVKVSCKASGYSFTTYYIHWVRQAPGQGLEWMGWFFPGSGNIKYNEKFKGRVTITADTSTSTAYMELSSLRSEDTAVYYCAGSYYSYDVLDYWGQGTTVTVSSGGGGSQVQLQQSGAELVRPGSSVKISCKASGYAFSSYWMNWVKQRPGQGLEWIGQIWPGDGDTNYNGKFKGKATLTADESSSTAYMQLSSLASEDSAVYFCARRETTTVGRYYYAMDYWGQGTTVTVSSASTKGPSVFPLAPSSKSTSGGTAALGCLVKDYFPEPVTVSWNSGALTSGVHTFPAVLQSSGLYSLSSVVTVPSSSLGTQTYICNVNHKPSNTKVDKKVEPKSC

SEQ ID NO: 629 - protein, 227 aa, synthetic construct; identical to SEQ ID NO: 387

SEQ ID NO: 630 - protein, 473 aa, synthetic construct
DIQMTQSPSFLSASVGDRVTITCKASQNVGINVVWHQQKPGKAPKALIYSSSHRYSGVPSRFSGSGSGTEFTLTISSLQPEDFATYFCQQFKSYPLTFGCGTKLEIKGGGGSGGGGSGGGGSQVQLVQSGAEVKKPGSSVKVSCKASGYSFTTYYIHWVRQAPGQCLEWMGWFFPGSGNIKYNEKFKGRVTITADTSTSTAYMELSSLRSEDTAVYYCAGSYYSYDVLDYWGQGTTVTVSSGGGGSQVQLQQSGAELVRPGSSVKISCKASGYAFSSYWMNWVKQRPGQGLEWIGQIWPGDGDTNYNGKFKGKATLTADESSSTAYMQLSSLASEDSAVYFCARRETTTVGRYYYAMDYWGQGTTVTVSSASTKGPSVFPLAPSSKSTSGGTAALGCLVKDYFPEPVTVSWNSGALTSGVHTFPAVLQSSGLYSLSSVVTVPSSSLGTQTYICNVNHKPSNTKVDKKVEPKSC

SEQ ID NO: 631 - protein, 227 aa, synthetic construct; identical to SEQ ID NO: 387

SEQ ID NO: 632 - protein, 470 aa, synthetic construct
QVQLVQSGAEVKKPGSSVKVSCKASGYSFTTYYIHWVRQAPGQGLEWMGWFFPGSGNIKYNEKFKGRVTITADTSTSTAYMELSSLRSEDTAVYYCAGSYYSYDVLDYWGQGTTVTVSSGGGGSGGGGSGGGGSDIQMTQSPSFLSASVGDRVTITCKASQNVGINVVWHQQKPGKAPKALIYSSSHRYSGVPSRFSGSGSGTEFTLTISSLQPEDFATYFCQQFKSYPLTFGQGTKLEIKGGGGSEVQLVESGGGLVKPGGSLKLSCAASGYTFTSYVMHWVRQAPGKGLEWIGYINPYNDGTKYNEKFQGRVTISSDKSISTAYMELSSLRSEDTAMYYCARGTYYYGTRVFDYWGQGTLVTVSSASTKGPSVFPLAPSSKSTSGGTAALGCLVKDYFPEPVTVSWNSGALTSGVHTFPAVLQSSGLYSLSSVVTVPSSSLGTQTYICNVNHKPSNTKVDKKVEPKSC

SEQ ID NO: 633 - protein, 224 aa, synthetic construct; identical to SEQ ID NO: 393

SEQ ID NO: 634 - protein, 470 aa, synthetic construct
QVQLVQSGAEVKKPGSSVKVSCKASGYSFTTYYIHWVRQAPGQCLEWMGWFFPGSGNIKYNEKFKGRVTITADTSTSTAYMELSSLRSEDTAVYYCAGSYYSYDVLDYWGQGTTVTVSSGGGGSGGGGSGGGGSDIQMTQSPSFLSASVGDRVTITCKASQNVGINVVWHQQKPGKAPKALIYSSSHRYSGVPSRFSGSGSGTEFTLTISSLQPEDFATYFCQQFKSYPLTFGCGTKLEIKGGGGSEVQLVESGGGLVKPGGSLKLSCAASGYTFTSYVMHWVRQAPGKGLEWIGYINPYNDGTKYNEKFQGRVTISSDKSISTAYMELSSLRSEDTAMYYCARGTYYYGTRVFDYWGQGTLVTVSSASTKGPSVFPLAPSSKSTSGGTAALGCLVKDYFPEPVTVSWNSGALTSGVHTFPAVLQSSGLYSLSSVVTVPSSSLGTQTYICNVNHKPSNTKVDKKVEPKSC

SEQ ID NO: 635 - protein, 224 aa, synthetic construct; identical to SEQ ID NO: 393

SEQ ID NO: 636 - protein, 470 aa, synthetic construct
DIQMTQSPSFLSASVGDRVTITCKASQNVGINVVWHQQKPGKAPKALIYSSSHRYSGVPSRFSGSGSGTEFTLTISSLQPEDFATYFCQQFKSYPLTFGQGTKLEIKGGGGSGGGGSGGGGSQVQLVQSGAEVKKPGSSVKVSCKASGYSFTTYYIHWVRQAPGQGLEWMGWFFPGSGNIKYNEKFKGRVTITADTSTSTAYMELSSLRSEDTAVYYCAGSYYSYDVLDYWGQGTTVTVSSGGGGSEVQLVESGGGLVKPGGSLKLSCAASGYTFTSYVMHWVRQAPGKGLEWIGYINPYNDGTKYNEKFQGRVTISSDKSISTAYMELSSLRSEDTAMYYCARGTYYYGTRVFDYWGQGTLVTVSSASTKGPSVFPLAPSSKSTSGGTAALGCLVKDYFPEPVTVSWNSGALTSGVHTFPAVLQSSGLYSLSSVVTVPSSSLGTQTYICNVNHKPSNTKVDKKVEPKSC

SEQ ID NO: 637 - protein, 224 aa, synthetic construct; identical to SEQ ID NO: 393

SEQ ID NO: 638 - protein, 470 aa, synthetic construct
DIQMTQSPSFLSASVGDRVTITCKASQNVGINVVWHQQKPGKAPKALIYSSSHRYSGVPSRFSGSGSGTEFTLTISSLQPEDFATYFCQQFKSYPLTFGCGTKLEIKGGGGSGGGGSGGGGSQVQLVQSGAEVKKPGSSVKVSCKASGYSFTTYYIHWVRQAPGQCLEWMGWFFPGSGNIKYNEKFKGRVTITADTSTSTAYMELSSLRSEDTAVYYCAGSYYSYDVLDYWGQGTTVTVSSGGGGSEVQLVESGGGLVKPGGSLKLSCAASGYTFTSYVMHWVRQAPGKGLEWIGYINPYNDGTKYNEKFQGRVTISSDKSISTAYMELSSLRSEDTAMYYCARGTYYYGTRVFDYWGQGTLVTVSSASTKGPSVFPLAPSSKSTSGGTAALGCLVKDYFPEPVTVSWNSGALTSGVHTFPAVLQSSGLYSLSSVVTVPSSSLGTQTYICNVNHKPSNTKVDKKVEPKSC

SEQ ID NO: 639 - protein, 224 aa, synthetic construct; identical to SEQ ID NO: 393

SEQ ID NO: 640 - protein, 478 aa, synthetic construct
EVQLVESGGGLVQPGGSLKLSCAASGFTFNKYAMNWVRQAPGKGLEWVARIRSKYNNYATYYADSVKDRFTISRDDSKNTAYLQMNNLKTEDTAVYYCVRHGNFGNSYISYWAYWGQGTLVTVSSGGGGSGGGGSGGGGSQTVVTQEPSLTVSPGGTVTLTCGSSTGAVTSGNYPNWVQQKPGQAPRGLIGGTKFLAPGTPARFSGSLLGGKAALTLSGVQPEDEAEYYCVLWYSNRWVFGGGTKLTVLGGGGSEVQLVESGGGLVKPGGSLKLSCAASGYTFTSYVMHWVRQAPGKGLEWIGYINPYNDGTKYNEKFQGRVTISSDKSISTAYMELSSLRSEDTAMYYCARGTYYYGTRVFDYWGQGTLVTVSSASTKGPSVFPLAPSSKSTSGGTAALGCLVKDYFPEPVTVSWNSGALTSGVHTFPAVLQSSGLYSLSSVVTVPSSSLGTQTYICNVNHKPSNTKVDKKVEPKSC

SEQ ID NO: 641 - protein, 224 aa, synthetic construct; identical to SEQ ID NO: 393

SEQ ID NO: 642 - protein, 225 aa, synthetic construct; identical to SEQ ID NO: 154

SEQ ID NO: 643 - protein, 225 aa, synthetic construct; identical to SEQ ID NO: 154

SEQ ID NO: 644 - protein, 225 aa, synthetic construct; identical to SEQ ID NO: 154

SEQ ID NO: 645 - protein, 225 aa, synthetic construct; identical to SEQ ID NO: 154

SEQ ID NO: 646 - protein, 225 aa, synthetic construct; identical to SEQ ID NO: 154

SEQ ID NO: 647 - protein, 225 aa, synthetic construct; identical to SEQ ID NO: 154

SEQ ID NO: 648 - protein, 225 aa, synthetic construct; identical to SEQ ID NO: 154

SEQ ID NO: 649 - protein, 225 aa, synthetic construct; identical to SEQ ID NO: 154

SEQ ID NO: 650 - protein, 225 aa, synthetic construct; identical to SEQ ID NO: 154

SEQ ID NO: 651 - protein, 225 aa, synthetic construct; identical to SEQ ID NO: 154

SEQ ID NO: 652 - protein, 225 aa, synthetic construct; identical to SEQ ID NO: 154

SEQ ID NO: 653 - protein, 225 aa, synthetic construct; identical to SEQ ID NO: 154

SEQ ID NO: 654 - protein, 225 aa, synthetic construct; identical to SEQ ID NO: 154

SEQ ID NO: 655 - protein, 225 aa, synthetic construct; identical to SEQ ID NO: 154

SEQ ID NO: 656 - protein, 225 aa, synthetic construct; identical to SEQ ID NO: 154

SEQ ID NO: 657 - protein, 225 aa, synthetic construct; identical to SEQ ID NO: 154

SEQ ID NO: 658 - protein, 225 aa, synthetic construct; identical to SEQ ID NO: 154

SEQ ID NO: 659 - protein, 225 aa, synthetic construct; identical to SEQ ID NO: 154

SEQ ID NO: 660 - protein, 225 aa, synthetic construct; identical to SEQ ID NO: 154

SEQ ID NO: 661 - protein, 225 aa, synthetic construct; identical to SEQ ID NO: 154

SEQ ID NO: 662 - protein, 225 aa, synthetic construct; identical to SEQ ID NO: 154

SEQ ID NO: 663 - protein, 225 aa, synthetic construct; identical to SEQ ID NO: 154

SEQ ID NO: 664 - protein, 225 aa, synthetic construct; identical to SEQ ID NO: 154

SEQ ID NO: 665 - protein, 225 aa, synthetic construct; identical to SEQ ID NO: 154

SEQ ID NO: 666 - protein, 225 aa, synthetic construct; identical to SEQ ID NO: 154

SEQ ID NO: 667 - protein, 225 aa, synthetic construct; identical to SEQ ID NO: 154

SEQ ID NO: 668 - protein, 225 aa, synthetic construct; identical to SEQ ID NO: 154

SEQ ID NO: 669 - protein, 225 aa, synthetic construct; identical to SEQ ID NO: 154

SEQ ID NO: 670 - protein, 225 aa, synthetic construct; identical to SEQ ID NO: 154

SEQ ID NO: 671 - protein, 225 aa, synthetic construct; identical to SEQ ID NO: 154

SEQ ID NO: 672 - protein, 225 aa, synthetic construct; identical to SEQ ID NO: 154

SEQ ID NO: 673 - protein, 225 aa, synthetic construct; identical to SEQ ID NO: 154

SEQ ID NO: 674 - protein, 225 aa, synthetic construct; identical to SEQ ID NO: 154

SEQ ID NO: 675 - protein, 225 aa, synthetic construct; identical to SEQ ID NO: 154

SEQ ID NO: 676 - protein, 225 aa, synthetic construct; identical to SEQ ID NO: 154

SEQ ID NO: 677 - protein, 225 aa, synthetic construct; identical to SEQ ID NO: 154

SEQ ID NO: 678 - protein, 225 aa, synthetic construct; identical to SEQ ID NO: 154

SEQ ID NO: 679 - protein, 225 aa, synthetic construct; identical to SEQ ID NO: 154

SEQ ID NO: 680 - protein, 225 aa, synthetic construct; identical to SEQ ID NO: 154

SEQ ID NO: 681 - protein, 225 aa, synthetic construct; identical to SEQ ID NO: 154

SEQ ID NO: 682 - protein, 225 aa, synthetic construct; identical to SEQ ID NO: 154

SEQ ID NO: 683 - protein, 225 aa, synthetic construct; identical to SEQ ID NO: 154

SEQ ID NO: 684 - protein, 225 aa, synthetic construct; identical to SEQ ID NO: 154

SEQ ID NO: 685 - protein, 225 aa, synthetic construct; identical to SEQ ID NO: 154

SEQ ID NO: 686 - protein, 225 aa, synthetic construct; identical to SEQ ID NO: 154

SEQ ID NO: 687 - protein, 225 aa, synthetic construct; identical to SEQ ID NO: 154

SEQ ID NO: 688 - protein, 232 aa, synthetic construct; identical to SEQ ID NO: 220

SEQ ID NO: 689 - protein, 226 aa, synthetic construct
QVQLVQSGAEVKKPGSSVKVSCKASGYSFTTYYIHWVRQAPGQGLEWMGWFFPGSGNIKYNEKFKGRVTITADTSTSTAYMELSSLRSEDTAVYYCAGSYYSYDVLDYWGQGTTVTVSSASVAAPSVFIFPPSDEQLKSGTASVVCLLNNFYPREAKVQWKVDNALQSGNSQESVTEQDSKDSTYSLSSTLTLSKADYEKHKVYACEVTHQGLSSPVTKSFNRGEC

SEQ ID NO: 690 - protein, 224 aa, synthetic construct
EVQLVESGGGLVQPGGSLRLSCAASGFTFSNFGMHWVRQAPGKGLEWVSYISSGSSTIYYADTLKGRFTISRDNSKNTLYLQMNSLRAEDTAVYYCARRGEGAMDYWGQGTTVTVSSASVAAPSVFIFPPSDEQLKSGTASVVCLLNNFYPREAKVQWKVDNALQSGNSQESVTEQDSKDSTYSLSSTLTLSKADYEKHKVYACEVTHQGLSSPVTKSFNRGEC

SEQ ID NO: 691 - protein, 226 aa, synthetic construct; identical to SEQ ID NO: 246

SEQ ID NO: 692 - protein, 232 aa, synthetic construct; identical to SEQ ID NO: 220

SEQ ID NO: 693 - protein, 226 aa, synthetic construct; identical to SEQ ID NO: 689

SEQ ID NO: 694 - protein, 224 aa, synthetic construct; identical to SEQ ID NO: 690

SEQ ID NO: 695 - protein, 226 aa, synthetic construct; identical to SEQ ID NO: 246

SEQ ID NO: 696 - protein, 228 aa, synthetic construct
EVQLQQSGAELVKPGASVKLSCTASGFNIKDTHMHWVKQRPEQGLEWIGRTDPASGDTKYDPKFQGKATITADTSSNTAYLHLSSLTSEDTAVYYCAHYYRDDVNYAMDYWGQGTTVTVSSASVAAPSVFIFPPSDEQLKSGTASVVCLLNNFYPREAKVQWKVDNALQSGNSQESVTEQDSKDSTYSLSSTLTLSKADYEKHKVYACEVTHQGLSSPVTKSFNRGEC

SEQ ID NO: 697 - protein, 212 aa, synthetic construct
DIQMTQSPSFLSASVGDRVTITCKASQNVGINVVWHQQKPGKAPKALIYSSSHRYSGVPSRFSGSGSGTEFTLTISSLQPEDFATYFCQQFKSYPLTFGQGTKLEIKSSASTKGPSVFPLAPSSKSTSGGTAALGCLVKDYFPEPVTVSWNSGALTSGVHTFPAVLQSSGLYSLSSVVTVPSSSLGTQTYICNVNHKPSNTKVDKKVEPKSC

SEQ ID NO: 698 - protein, 212 aa, synthetic construct
DIQMTQSPSFLSASVGDRVTITCKASQNVGINVVWYQQKPGKAPKLLIYSSSHRYSGVPSRFSGSGSGTEFTLTISSLQPEDFATYFCQQFKSYPLTFGQGTKLEIKSSASTKGPSVFPLAPSSKSTSGGTAALGCLVKDYFPEPVTVSWNSGALTSGVHTFPAVLQSSGLYSLSSVVTVPSSSLGTQTYICNVNHKPSNTKVDKKVEPKSC

SEQ ID NO: 699 - protein, 212 aa, synthetic construct
DIQMTQSPSFLSASVGDRVTITCKASQNVGNNVAWYQQKPGKAPKLLIYSSSHRYSGVPSRFSGSGSGTEFTLTISSLQPEDFATYFCQQFKSYPLTFGQGTKLEIKSSASTKGPSVFPLAPSSKSTSGGTAALGCLVKDYFPEPVTVSWNSGALTSGVHTFPAVLQSSGLYSLSSVVTVPSSSLGTQTYICNVNHKPSNTKVDKKVEPKSC

SEQ ID NO: 700 - protein, 212 aa, synthetic construct
DIQMTQSPSSLSASVGDRVTITCKASQNVGINVVWYQQKPGKAPKLLIYSSSHRYSGVPSRFSGSGSGTEFTLTISSLQPEDFATYYCQQFKSYPLTFGQGTKLEIKSSASTKGPSVFPLAPSSKSTSGGTAALGCLVKDYFPEPVTVSWNSGALTSGVHTFPAVLQSSGLYSLSSVVTVPSSSLGTQTYICNVNHKPSNTKVDKKVEPKSC

SEQ ID NO: 701 - protein, 212 aa, synthetic construct
DIQMTQSPSSLSASVGDRVTITCKASQNVGNNVAWYQQKPGKAPKLLIYSSSHRYSGVPSRFSGSGSGTEFTLTISSLQPEDFATYYCQQFKSYPLTFGQGTKLEIKSSASTKGPSVFPLAPSSKSTSGGTAALGCLVKDYFPEPVTVSWNSGALTSGVHTFPAVLQSSGLYSLSSVVTVPSSSLGTQTYICNVNHKPSNTKVDKKVEPKSC

SEQ ID NO: 702 - protein, 212 aa, synthetic construct
DIQMTQSPSSLSASVGDRVTITCRASQNVGNNVAWYQQKPGKAPKLLIYSSSHRYSGVPSRFSGSGSGTEFTLTISSLQPEDFATYYCQQFKSYPLTFGQGTKLEIKSSASTKGPSVFPLAPSSKSTSGGTAALGCLVKDYFPEPVTVSWNSGALTSGVHTFPAVLQSSGLYSLSSVVTVPSSSLGTQTYICNVNHKPSNTKVDKKVEPKSC

SEQ ID NO: 703 - protein, 212 aa, synthetic construct; identical to SEQ ID NO: 697

SEQ ID NO: 704 - protein, 212 aa, synthetic construct; identical to SEQ ID NO: 698

SEQ ID NO: 705 - protein, 212 aa, synthetic construct; identical to SEQ ID NO: 699

SEQ ID NO: 706 - protein, 212 aa, synthetic construct; identical to SEQ ID NO: 700

SEQ ID NO: 707 - protein, 212 aa, synthetic construct; identical to SEQ ID NO: 701

SEQ ID NO: 708 - protein, 212 aa, synthetic construct; identical to SEQ ID NO: 702

SEQ ID NO: 709 - protein, 211 aa, synthetic construct
DNQLTQSPSFLSASVGDRVTITCRASSSVNYIYWYQQKPGKAPKLLIYYTSNLAPGVPSRFSGSGSGNEYTLTISSLQPEDFATYYCQQFTSSPFTFGQGTKLEIKSSASTKGPSVFPLAPSSKSTSGGTAALGCLVKDYFPEPVTVSWNSGALTSGVHTFPAVLQSSGLYSLSSVVTVPSSSLGTQTYICNVNHKPSNTKVDKKVEPKSC

SEQ ID NO: 710 - protein, 211 aa, synthetic construct
DIQLTQSPSFLSASVGDRVTITCRASSSVNYIYWYQQKPGKAPKLLIYYTSNLAPGVPSRFSGSGSGTEFTLTISSLQPEDFATYYCQQFTSSPFTFGQGTKLEIKSSASTKGPSVFPLAPSSKSTSGGTAALGCLVKDYFPEPVTVSWNSGALTSGVHTFPAVLQSSGLYSLSSVVTVPSSSLGTQTYICNVNHKPSNTKVDKKVEPKSC

SEQ ID NO: 711 - protein, 211 aa, synthetic construct
DIQLTQSPSFLSASVGDRVTITCRASSSVNYIYWYQQKPGKAPKLLIYYTSNLAPGVPSRFSGSGSGTEFTLTISSLQPEDFATYYCQQYTSSPFTFGQGTKLEIKSSASTKGPSVFPLAPSSKSTSGGTAALGCLVKDYFPEPVTVSWNSGALTSGVHTFPAVLQSSGLYSLSSVVTVPSSSLGTQTYICNVNHKPSNTKVDKKVEPKSC

SEQ ID NO: 712 - protein, 211 aa, synthetic construct
DIQLTQSPSFLSASVGDRVTITCRASQSVNYIYWYQQKPGKAPKLLIYYTSNLAPGVPSRFSGSGSGTEFTLTISSLQPEDFATYYCQQYTSSPFTFGQGTKLEIKSSASTKGPSVFPLAPSSKSTSGGTAALGCLVKDYFPEPVTVSWNSGALTSGVHTFPAVLQSSGLYSLSSVVTVPSSSLGTQTYICNVNHKPSNTKVDKKVEPKSC

SEQ ID NO: 713 - protein, 211 aa, synthetic construct
DIQLTQSPSFLSASVGDRVTITCRASQSVNYLYWYQQKPGKAPKLLIYYTSNLAPGVPSRFSGSGSGTEFTLTISSLQPEDFATYYCQQYTSSPFTFGQGTKLEIKSSASTKGPSVFPLAPSSKSTSGGTAALGCLVKDYFPEPVTVSWNSGALTSGVHTFPAVLQSSGLYSLSSVVTVPSSSLGTQTYICNVNHKPSNTKVDKKVEPKSC

SEQ ID NO: 714 - protein, 211 aa, synthetic construct; identical to SEQ ID NO: 713

SEQ ID NO: 715 - protein, 211 aa, synthetic construct; identical to SEQ ID NO: 709

SEQ ID NO: 716 - protein, 211 aa, synthetic construct; identical to SEQ ID NO: 710

SEQ ID NO: 717 - protein, 211 aa, synthetic construct; identical to SEQ ID NO: 711

SEQ ID NO: 718 - protein, 211 aa, synthetic construct; identical to SEQ ID NO: 712

SEQ ID NO: 719 - protein, 211 aa, synthetic construct; identical to SEQ ID NO: 713

SEQ ID NO: 720 - protein, 211 aa, synthetic construct; identical to SEQ ID NO: 713

SEQ ID NO: 721 - protein, 212 aa, synthetic construct; identical to SEQ ID NO: 697

SEQ ID NO: 722 - protein, 211 aa, synthetic construct; identical to SEQ ID NO: 709

SEQ ID NO: 723 - protein, 214 aa, synthetic construct; identical to SEQ ID NO: 219

SEQ ID NO: 724 - protein, 226 aa, synthetic construct; identical to SEQ ID NO: 689

SEQ ID NO: 725 - protein, 226 aa, synthetic construct
QVQLVQSGAEVKKPGSSVKVSCKASGHDFRLTYIHWVRQAPGQGLEWMGRVSAGSGNVKYNEKFKGRVTITADTSTSTAYMELSSLRSEDTAVYYCAVSYYSYDVLDYWGQGTTVTVSSASVAAPSVFIFPPSDEQLKSGTASVVCLLNNFYPREAKVQWKVDNALQSGNSQESVTEQDSKDSTYSLSSTLTLSKADYEKHKVYACEVTHQGLSSPVTKSFNRGEC

SEQ ID NO: 726 - protein, 224 aa, synthetic construct; identical to SEQ ID NO: 690

SEQ ID NO: 727 - protein, 232 aa, synthetic construct; identical to SEQ ID NO: 220

SEQ ID NO: 728 - protein, 226 aa, synthetic construct; identical to SEQ ID NO: 689

SEQ ID NO: 729 - protein, 226 aa, synthetic construct; identical to SEQ ID NO: 725

SEQ ID NO: 730 - protein, 224 aa, synthetic construct; identical to SEQ ID NO: 690

SEQ ID NO: 731 - protein, 232 aa, synthetic construct; identical to SEQ ID NO: 220

SEQ ID NO: 732 - protein, 226 aa, synthetic construct; identical to SEQ ID NO: 689

SEQ ID NO: 733 - protein, 226 aa, synthetic construct; identical to SEQ ID NO: 725

SEQ ID NO: 734 - protein, 224 aa, synthetic construct; identical to SEQ ID NO: 690

SEQ ID NO: 735 - protein, 232 aa, synthetic construct; identical to SEQ ID NO: 220

SEQ ID NO: 736 - protein, 226 aa, synthetic construct; identical to SEQ ID NO: 689

SEQ ID NO: 737 - protein, 226 aa, synthetic construct; identical to SEQ ID NO: 725

SEQ ID NO: 738 - protein, 224 aa, synthetic construct; identical to SEQ ID NO: 690

SEQ ID NO: 739 - protein, 232 aa, synthetic construct; identical to SEQ ID NO: 220

SEQ ID NO: 740 - protein, 226 aa, synthetic construct; identical to SEQ ID NO: 689

SEQ ID NO: 741 - protein, 226 aa, synthetic construct; identical to SEQ ID NO: 725

SEQ ID NO: 742 - protein, 224 aa, synthetic construct; identical to SEQ ID NO: 690

SEQ ID NO: 743 - protein, 232 aa, synthetic construct; identical to SEQ ID NO: 220

SEQ ID NO: 744 - protein, 226 aa, synthetic construct; identical to SEQ ID NO: 689

SEQ ID NO: 745 - protein, 226 aa, synthetic construct; identical to SEQ ID NO: 725

SEQ ID NO: 746 - protein, 224 aa, synthetic construct; identical to SEQ ID NO: 690

SEQ ID NO: 747 - protein, 232 aa, synthetic construct; identical to SEQ ID NO: 220

SEQ ID NO: 748 - protein, 226 aa, synthetic construct; identical to SEQ ID NO: 689

SEQ ID NO: 749 - protein, 484 aa, synthetic construct
DIVMTQSPATLSLSPGERATLSCRSSKSLQNVNGNTYLYWFQQKPGQSPQLLIYRMSNLNSGVPDRFSGSGSGTEFTLTISSLEPEDFAVYYCMQHLEYPITFGAGTKLEIKGGGGSGGGGSGGGGSGGGGSEVQLVESGGGLVKPGGSLKLSCAASGYTFTSYVMHWVRQAPGKGLEWIGYINPYNDGTKYNEKFQGRVTISSDKSISTAYMELSSLRSEDTAMYYCARGTYYYGTRVFDYWGQGTLVTVSSGGGGSQVQLVQSGAEVKKPGSSVKVSCKASGYSFTTYYIHWVRQAPGQGLEWMGWFFPGSGNIKYNEKFKGRVTITADTSTSTAYMELSSLRSEDTAVYYCAGSYYSYDVLDYWGQGTTVTVSSASVAAPSVFIFPPSDEQLKSGTASVVCLLNNFYPREAKVQWKVDNALQSGNSQESVTEQDSKDSTYSLSSTLTLSKADYEKHKVYACEVTHQGLSSPVTKSFNRGEC

SEQ ID NO: 750 - protein, 226 aa, synthetic construct; identical to SEQ ID NO: 689

SEQ ID NO: 751 - protein, 226 aa, synthetic construct; identical to SEQ ID NO: 689

SEQ ID NO: 752 - protein, 226 aa, synthetic construct; identical to SEQ ID NO: 725

SEQ ID NO: 753 - protein, 484 aa, synthetic construct
DIVMTQSPATLSLSPGERATLSCRSSKSLQNVNGNTYLYWFQQKPGQSPQLLIYRMSNLNSGVPDRFSGSGSGTEFTLTISSLEPEDFAVYYCMQHLEYPITFGAGTKLEIKGGGGSGGGGSGGGGSGGGGSEVQLVESGGGLVKPGGSLKLSCAASGYTFTSYVMHWVRQAPGKGLEWIGYINPYNDGTKYNEKFQGRVTISSDKSISTAYMELSSLRSEDTAMYYCARGTYYYGTRVFDYWGQGTLVTVSSGGGGSQVQLVQSGAEVKKPGSSVKVSCKASGHDFRLTYIHWVRQAPGQGLEWMGRVSAGSGNVKYNEKFKGRVTITADTSTSTAYMELSSLRSEDTAVYYCAVSYYSYDVLDYWGQGTTVTVSSASVAAPSVFIFPPSDEQLKSGTASVVCLLNNFYPREAKVQWKVDNALQSGNSQESVTEQDSKDSTYSLSSTLTLSKADYEKHKVYACEVTHQGLSSPVTKSFNRGEC

SEQ ID NO: 754 - protein, 226 aa, synthetic construct; identical to SEQ ID NO: 725

SEQ ID NO: 755 - protein, 226 aa, synthetic construct; identical to SEQ ID NO: 725

SEQ ID NO: 756 - protein, 232 aa, synthetic construct; identical to SEQ ID NO: 220

SEQ ID NO: 757 - protein, 490 aa, synthetic construct
DIVMTQSPATLSLSPGERATLSCRSSKSLQNVNGNTYLYWFQQKPGQSPQLLIYRMSNLNSGVPDRFSGSGSGTEFTLTISSLEPEDFAVYYCMQHLEYPITFGAGTKLEIKGGGGSGGGGSGGGGSGGGGSEVQLVESGGGLVKPGGSLKLSCAASGYTFTSYVMHWVRQAPGKGLEWIGYINPYNDGTKYNEKFQGRVTISSDKSISTAYMELSSLRSEDTAMYYCARGTYYYGTRVFDYWGQGTLVTVSSGGGGSEVQLVESGGGLVQPGGSLKLSCAASGFTFNKYAMNWVRQAPGKGLEWVARIRSKYNNYATYYADSVKDRFTISRDDSKNTAYLQMNNLKTEDTAVYYCVRHGNFGNSYISYWAYWGQGTLVTVSSASVAAPSVFIFPPSDEQLKSGTASVVCLLNNFYPREAKVQWKVDNALQSGNSQESVTEQDSKDSTYSLSSTLTLSKADYEKHKVYACEVTHQGLSSPVTKSFNRGEC

SEQ ID NO: 758 - protein, 232 aa, synthetic construct; identical to SEQ ID NO: 220

SEQ ID NO: 759 - protein, 232 aa, synthetic construct; identical to SEQ ID NO: 220

SEQ ID NO: 760 - protein, 465 aa, synthetic construct; identical to SEQ ID NO: 493

SEQ ID NO: 761 - protein, 219 aa, synthetic construct; identical to SEQ ID NO: 394

SEQ ID NO: 762 - protein, 465 aa, synthetic construct; identical to SEQ ID NO: 495

SEQ ID NO: 763 - protein, 219 aa, synthetic construct; identical to SEQ ID NO: 394

SEQ ID NO: 764 - protein, 219 aa, synthetic construct; identical to SEQ ID NO: 394

SEQ ID NO: 765 - protein, 219 aa, synthetic construct; identical to SEQ ID NO: 394

SEQ ID NO: 766 - protein, 464 aa, synthetic construct; identical to SEQ ID NO: 418

SEQ ID NO: 767 - protein, 218 aa, synthetic construct; identical to SEQ ID NO: 388

SEQ ID NO: 768 - protein, 464 aa, synthetic construct; identical to SEQ ID NO: 487

SEQ ID NO: 769 - protein, 218 aa, synthetic construct; identical to SEQ ID NO: 388

SEQ ID NO: 770 - protein, 218 aa, synthetic construct; identical to SEQ ID NO: 388

SEQ ID NO: 771 - protein, 218 aa, synthetic construct; identical to SEQ ID NO: 388

SEQ ID NO: 772 - protein, 218 aa, synthetic construct; identical to SEQ ID NO: 388

SEQ ID NO: 773 - protein, 218 aa, synthetic construct; identical to SEQ ID NO: 388

SEQ ID NO: 774 - protein, 218 aa, synthetic construct; identical to SEQ ID NO: 388

SEQ ID NO: 775 - protein, 218 aa, synthetic construct; identical to SEQ ID NO: 388

SEQ ID NO: 776 - protein, 218 aa, synthetic construct; identical to SEQ ID NO: 388

SEQ ID NO: 777 - protein, 218 aa, synthetic construct; identical to SEQ ID NO: 388

SEQ ID NO: 778 - protein, 218 aa, synthetic construct; identical to SEQ ID NO: 388

SEQ ID NO: 779 - protein, 218 aa, synthetic construct; identical to SEQ ID NO: 388

SEQ ID NO: 780 - protein, 218 aa, synthetic construct; identical to SEQ ID NO: 388

SEQ ID NO: 781 - protein, 218 aa, synthetic construct; identical to SEQ ID NO: 388

SEQ ID NO: 782 - protein, 218 aa, synthetic construct; identical to SEQ ID NO: 388

SEQ ID NO: 783 - protein, 218 aa, synthetic construct; identical to SEQ ID NO: 388

SEQ ID NO: 784 - protein, 465 aa, synthetic construct; identical to SEQ ID NO: 497

SEQ ID NO: 785 - protein, 219 aa, synthetic construct; identical to SEQ ID NO: 394

SEQ ID NO: 786 - protein, 465 aa, synthetic construct; identical to SEQ ID NO: 499

SEQ ID NO: 787 - protein, 219 aa, synthetic construct; identical to SEQ ID NO: 394

SEQ ID NO: 788 - protein, 219 aa, synthetic construct; identical to SEQ ID NO: 394

SEQ ID NO: 789 - protein, 219 aa, synthetic construct; identical to SEQ ID NO: 394

SEQ ID NO: 790 - protein, 464 aa, synthetic construct; identical to SEQ ID NO: 489

SEQ ID NO: 791 - protein, 464 aa, synthetic construct; identical to SEQ ID NO: 491

SEQ ID NO: 792 - protein, 218 aa, synthetic construct; identical to SEQ ID NO: 388

SEQ ID NO: 793 - protein, 218 aa, synthetic construct; identical to SEQ ID NO: 388

SEQ ID NO: 794 - protein, 218 aa, synthetic construct; identical to SEQ ID NO: 388

SEQ ID NO: 795 - protein, 218 aa, synthetic construct; identical to SEQ ID NO: 388

SEQ ID NO: 796 - protein, 218 aa, synthetic construct; identical to SEQ ID NO: 388

SEQ ID NO: 797 - protein, 218 aa, synthetic construct; identical to SEQ ID NO: 388

SEQ ID NO: 798 - protein, 218 aa, synthetic construct; identical to SEQ ID NO: 388

SEQ ID NO: 799 - protein, 218 aa, synthetic construct; identical to SEQ ID NO: 388

SEQ ID NO: 800 - protein, 218 aa, synthetic construct; identical to SEQ ID NO: 388

SEQ ID NO: 801 - protein, 218 aa, synthetic construct; identical to SEQ ID NO: 388

SEQ ID NO: 802 - protein, 218 aa, synthetic construct; identical to SEQ ID NO: 388

SEQ ID NO: 803 - protein, 218 aa, synthetic construct; identical to SEQ ID NO: 388

SEQ ID NO: 804 - protein, 218 aa, synthetic construct; identical to SEQ ID NO: 388

SEQ ID NO: 805 - protein, 218 aa, synthetic construct; identical to SEQ ID NO: 388

SEQ ID NO: 806 - protein, 218 aa, synthetic construct; identical to SEQ ID NO: 388

SEQ ID NO: 807 - protein, 218 aa, synthetic construct; identical to SEQ ID NO: 388

SEQ ID NO: 808 - protein, 218 aa, synthetic construct; identical to SEQ ID NO: 388

SEQ ID NO: 809 - protein, 218 aa, synthetic construct; identical to SEQ ID NO: 388

SEQ ID NO: 810 - protein, 218 aa, synthetic construct; identical to SEQ ID NO: 388

SEQ ID NO: 811 - protein, 218 aa, synthetic construct; identical to SEQ ID NO: 388

SEQ ID NO: 812 - protein, 449 aa, synthetic construct
EVQLVESGGGLVKPGGSLKLSCAASGYTFTSYVMHWVRQAPGKGLEWIGYINPYNDGTKYNEKFQGRVTISSDKSISTAYMELSSLRSEDTAMYYCARGTYYYGTRVFDYWGQGTLVTVSSASTKGPSVFPLAPSSKSTSGGTAALGCLVKDYFPEPVTVSWNSGALTSGVHTFPAVLQSSGLYSLSSVVTVPSSSLGTQTYICNVNHKPSNTKVDKKVEPKSCDKTHTCPPCPAPEAAGGPSVFLFPPKPKDTLMISRTPEVTCVVVDVSHEDPEVKFNWYVDGVEVHNAKTKPREEQYGSTYRVVSVLTVLHQDWLNGKEYKCKVSNKALGAPIEKTISKAKGQPREPQVYTLPPCRDELTKNQVSLWCLVKGFYPSDIAVEWESNGQPENNYKTTPPVLDSDGSFFLYSKLTVDKSRWQQGNVFSCSVMHEALHNHYTQKSLSLSP

SEQ ID NO: 813 - protein, 703 aa, synthetic construct
EVQLVESGGGLVQPGGSLKLSCAASGFTFNKYAMNWVRQAPGKGLEWVARIRSKYNNYATYYADSVKDRFTISRDDSKNTAYLQMNNLKTEDTAVYYCVRHGNFGNSYISYWAYWGQGTLVTVSSGGGGSGGGGSGGGGSQTVVTQEPSLTVSPGGTVTLTCGSSTGAVTSGNYPNWVQQKPGQAPRGLIGGTKFLAPGTPARFSGSLLGGKAALTLSGVQPEDEAEYYCVLWYSNRWVFGGGTKLTVLGGGGSEVQLVESGGGLVKPGGSLKLSCAASGYTFTSYVMHWVRQAPGKGLEWIGYINPYNDGTKYNEKFQGRVTISSDKSISTAYMELSSLRSEDTAMYYCARGTYYYGTRVFDYWGQGTLVTVSSASTKGPSVFPLAPSSKSTSGGTAALGCLVKDYFPEPVTVSWNSGALTSGVHTFPAVLQSSGLYSLSSVVTVPSSSLGTQTYICNVNHKPSNTKVDKKVEPKSCDKTHTCPPCPAPEAAGGPSVFLFPPKPKDTLMISRTPEVTCVVVDVSHEDPEVKFNWYVDGVEVHNAKTKPREEQYGSTYRVVSVLTVLHQDWLNGKEYKCKVSNKALGAPIEKTISKAKGQPREPQVYTLPPCRDELTKNQVSLWCLVKGFYPSDIAVEWESNGQPENNYKTTPPVLDSDGSFFLYSKLTVDKSRWQQGNVFSCSVMHEALHNHYTQKSLSLSP

SEQ ID NO: 814 - protein, 717 aa, synthetic construct
EVQLVESGGGLVKPGGSLKLSCAASGYTFTSYVMHWVRQAPGKGLEWIGYINPYNDGTKYNEKFQGRVTISSDKSISTAYMELSSLRSEDTAMYYCARGTYYYGTRVFDYWGQGTLVTVSSASTKGPSVFPLAPSSKSTSGGTAALGCLVKDYFPEPVTVSWNSGALTSGVHTFPAVLQSSGLYSLSSVVTVPSSSLGTQTYICNVNHKPSNTKVDKKVEPKSCGGGGSGGGGSEVQLVESGGGLVQPGGSLKLSCAASGFTFNKYAMNWVRQAPGKGLEWVARIRSKYNNYATYYADSVKDRFTISRDDSKNTAYLQMNNLKTEDTAVYYCVRHGNFGNSYISYWAYWGQGTLVTVSSGGGGSGGGGSGGGGSQTVVTQEPSLTVSPGGTVTLTCGSSTGAVTSGNYPNWVQQKPGQAPRGLIGGTKFLAPGTPARFSGSLLGGKAALTLSGVQPEDEAEYYCVLWYSNRWVFGGGTKLTVLGGGGSGGGGSKTHTCPPCPAPEAAGGPSVFLFPPKPKDTLMISRTPEVTCVVVDVSHEDPEVKFNWYVDGVEVHNAKTKPREEQYGSTYRVVSVLTVLHQDWLNGKEYKCKVSNKALGAPIEKTISKAKGQPREPQVYTLPPCRDELTKNQVSLWCLVKGFYPSDIAVEWESNGQPENNYKTTPPVLDSDGSFFLYSKLTVDKSRWQQGNVFSCSVMHEALHNHYTQKSLSLSP

SEQ ID NO: 815 - protein, 465 aa, synthetic construct; identical to SEQ ID NO: 497

SEQ ID NO: 816 - protein, 219 aa, synthetic construct; identical to SEQ ID NO: 394

SEQ ID NO: 817 - protein, 457 aa, synthetic construct
QVQLVQSGAEVKKPGSSVKVSCKASGYSFTTYYIHWVRQAPGQCLEWMGWFFPGSGNIKYNEKFKGRVTITADTSTSTAYMELSSLRSEDTAVYYCAGSYYSYDVLDYWGQGTTVTVSSGGGGSGGGGSGGGGSDIQMTQSPSFLSASVGDRVTITCKASQNVGINVVWHQQKPGKAPKALIYSSSHRYSGVPSRFSGSGSGTEFTLTISSLQPEDFATYFCQQFKSYPLTFGCGTKLEIKGGGGSEIVLTQSPAIMSASPGERVTMTCSASSGVNYMHWYQQKPGTSPRRWIYDTSKLASGVPARFSGSGSGTDYSLTISSMEPEDAATYYCHQRGSYTFGGGTKLEIKRTVAAPSVFIFPPSDEQLKSGTASVVCLLNNFYPREAKVQWKVDNALQSGNSQESVTEQDSKDSTYSLSSTLTLSKADYEKHKVYACEVTHQGLSSPVTKSFNRGEC

SEQ ID NO: 818 - protein, 211 aa, synthetic construct; identical to SEQ ID NO: 396

SEQ ID NO: 819 - protein, 459 aa, synthetic construct
QVQLVQSGAEVKKPGSSVKVSCKASGYSFTTYYIHWVRQAPGQCLEWMGWFFPGSGNIKYNEKFKGRVTITADTSTSTAYMELSSLRSEDTAVYYCAGSYYSYDVLDYWGQGTTVTVSSGGGGSGGGGSGGGGSDIQMTQSPSFLSASVGDRVTITCKASQNVGINVVWHQQKPGKAPKALIYSSSHRYSGVPSRFSGSGSGTEFTLTISSLQPEDFATYFCQQFKSYPLTFGCGTKLEIKGGGGSEIVLTQSPATLSLSPGERATLSCSASSSVSYMHWYQQKPGQAPRLLIYDTSKLASGIPARFSGSGSGTDFTLTISSLEPEDVAVYYCFQGSVYPFTFGQGTKLEIKRTVAAPSVFIFPPSDEQLKSGTASVVCLLNNFYPREAKVQWKVDNALQSGNSQESVTEQDSKDSTYSLSSTLTLSKADYEKHKVYACEVTHQGLSSPVTKSFNRGEC

SEQ ID NO: 820 - protein, 213 aa, synthetic construct; identical to SEQ ID NO: 398

SEQ ID NO: 821 - protein, 464 aa, synthetic construct
QVQLVQSGAEVKKPGSSVKVSCKASGYSFTTYYIHWVRQAPGQCLEWMGWFFPGSGNIKYNEKFKGRVTITADTSTSTAYMELSSLRSEDTAVYYCAGSYYSYDVLDYWGQGTTVTVSSGGGGSGGGGSGGGGSDIQMTQSPSFLSASVGDRVTITCKASQNVGINVVWHQQKPGKAPKALIYSSSHRYSGVPSRFSGSGSGTEFTLTISSLQPEDFATYFCQQFKSYPLTFGCGTKLEIKGGGGSEIVLTQSPDFQSVTPKEKVTITCRASESVDTFGISFMNWFQQKPDQSPKLLIHEASNQGSGVPSRFSGSGSGTDFTLTINSLEAEDAATYYCQQSKEVPFTFGGGTKVEIKRTVAAPSVFIFPPSDEQLKSGTASVVCLLNNFYPREAKVQWKVDNALQSGNSQESVTEQDSKDSTYSLSSTLTLSKADYEKHKVYACEVTHQGLSSPVTKSFNRGEC

SEQ ID NO: 822 - protein, 218 aa, synthetic construct; identical to SEQ ID NO: 400

SEQ ID NO: 823 - protein, 465 aa, synthetic construct; identical to SEQ ID NO: 495

SEQ ID NO: 824 - protein, 465 aa, synthetic construct; identical to SEQ ID NO: 499

SEQ ID NO: 825 - protein, 219 aa, synthetic construct; identical to SEQ ID NO: 394

SEQ ID NO: 826 - protein, 467 aa, synthetic construct
EVQLVESGGGLVQPGGSLKLSCAASGFTFNKYAMNWVRQAPGKGLEWVARIRSKYNNYATYYADSVKDRFTISRDDSKNTAYLQMNNLKTEDTAVYYCVRHGNFGNSYISYWAYWGQGTLVTVSSGGGGSGGGGSGGGGSQTVVTQEPSLTVSPGGTVTLTCGSSTGAVTSGNYPNWVQQKPGQAPRGLIGGTKFLAPGTPARFSGSLLGGKAALTLSGVQPEDEAEYYCVLWYSNRWVFGGGTKLTVLGGGGSEIVLTQSPATLSLSPGERATLSCSASSSVSYMHWYQQKPGQAPRLLIYDTSKLASGIPARFSGSGSGTDFTLTISSLEPEDVAVYYCFQGSVYPFTFGQGTKLEIKRTVAAPSVFIFPPSDEQLKSGTASVVCLLNNFYPREAKVQWKVDNALQSGNSQESVTEQDSKDSTYSLSSTLTLSKADYEKHKVYACEVTHQGLSSPVTKSFNRGEC

SEQ ID NO: 827 - protein, 213 aa, synthetic construct; identical to SEQ ID NO: 398

SEQ ID NO: 828 - protein, 459 aa, synthetic construct
QVQLVQSGAEVKKPGSSVKVSCKASGYSFTTYYIHWVRQAPGQCLEWMGWFFPGSGNIKYNEKFKGRVTITADTSTSTAYMELSSLRSEDTAVYYCAGSYYSYDVLDYWGQGTTVTVSSGGGGSGGGGSGGGGSDIQMTQSPSFLSASVGDRVTITCKASQNVGINVVWHQQKPGKAPKALIYSSSHRYSGVPSRFSGSGSGTEFTLTISSLQPEDFATYFCQQFKSYPLTFGCGTKLEIKGGGGSEIVLTQSPATLSLSPGERATLSCSASSSVGYMHWYQQKPGQAPRLLIYDTSKLASGIPARFSGSGSGTDFTLTISSLEPEDFAVYYCFQGSVYPFTFGQGTKLEIKRTVAAPSVFIFPPSDEQLKSGTASVVCLLNNFYPREAKVQWKVDNALQSGNSQESVTEQDSKDSTYSLSSTLTLSKADYEKHKVYACEVTHQGLSSPVTKSFNRGEC

SEQ ID NO: 829 - protein, 459 aa, synthetic construct; identical to SEQ ID NO: 828

SEQ ID NO: 830 - protein, 459 aa, synthetic construct
QVQLVQSGAEVKKPGSSVKVSCKASGYSFTTYYIHWVRQAPGQCLEWMGWFFPGSGNIKYNEKFKGRVTITADTSTSTAYMELSSLRSEDTAVYYCAGSYYSYDVLDYWGQGTTVTVSSGGGGSGGGGSGGGGSDIQMTQSPSFLSASVGDRVTITCKASQNVGINVVWHQQKPGKAPKALIYSSSHRYSGVPSRFSGSGSGTEFTLTISSLQPEDFATYFCQQFKSYPLTFGCGTKLEIKGGGGSEIVLTQSPATLSLSPGERATLSCSASSSVGYMHWYQQKPGQAPRLLIYDTSKLAFGIPARFSGSGSGTDFTLTISSLEPEDFAVYYCFQGSVYPFTFGQGTKLEIKRTVAAPSVFIFPPSDEQLKSGTASVVCLLNNFYPREAKVQWKVDNALQSGNSQESVTEQDSKDSTYSLSSTLTLSKADYEKHKVYACEVTHQGLSSPVTKSFNRGEC

SEQ ID NO: 831 - protein, 213 aa, synthetic construct; identical to SEQ ID NO: 402

SEQ ID NO: 832 - protein, 213 aa, synthetic construct; identical to SEQ ID NO: 402

SEQ ID NO: 833 - protein, 213 aa, synthetic construct; identical to SEQ ID NO: 406

SEQ ID NO: 834 - protein, 467 aa, synthetic construct
EVQLVESGGGLVQPGGSLKLSCAASGFTFNKYAMNWVRQAPGKGLEWVARIRSKYNNYATYYADSVKDRFTISRDDSKNTAYLQMNNLKTEDTAVYYCVRHGNFGNSYISYWAYWGQGTLVTVSSGGGGSGGGGSGGGGSQTVVTQEPSLTVSPGGTVTLTCGSSTGAVTSGNYPNWVQQKPGQAPRGLIGGTKFLAPGTPARFSGSLLGGKAALTLSGVQPEDEAEYYCVLWYSNRWVFGGGTKLTVLGGGGSEIVLTQSPATLSLSPGERATLSCSASSSVGYMHWYQQKPGQAPRLLIYDTSKLASGIPARFSGSGSGTDFTLTISSLEPEDFAVYYCFQGSVYPFTFGQGTKLEIKRTVAAPSVFIFPPSDEQLKSGTASVVCLLNNFYPREAKVQWKVDNALQSGNSQESVTEQDSKDSTYSLSSTLTLSKADYEKHKVYACEVTHQGLSSPVTKSFNRGEC

SEQ ID NO: 835 - protein, 467 aa, synthetic construct; identical to SEQ ID NO: 834

SEQ ID NO: 836 - protein, 467 aa, synthetic construct
EVQLVESGGGLVQPGGSLKLSCAASGFTFNKYAMNWVRQAPGKGLEWVARIRSKYNNYATYYADSVKDRFTISRDDSKNTAYLQMNNLKTEDTAVYYCVRHGNFGNSYISYWAYWGQGTLVTVSSGGGGSGGGGSGGGGSQTVVTQEPSLTVSPGGTVTLTCGSSTGAVTSGNYPNWVQQKPGQAPRGLIGGTKFLAPGTPARFSGSLLGGKAALTLSGVQPEDEAEYYCVLWYSNRWVFGGGTKLTVLGGGGSEIVLTQSPATLSLSPGERATLSCSASSSVGYMHWYQQKPGQAPRLLIYDTSKLAFGIPARFSGSGSGTDFTLTISSLEPEDFAVYYCFQGSVYPFTFGQGTKLEIKRTVAAPSVFIFPPSDEQLKSGTASVVCLLNNFYPREAKVQWKVDNALQSGNSQESVTEQDSKDSTYSLSSTLTLSKADYEKHKVYACEVTHQGLSSPVTKSFNRGEC

SEQ ID NO: 837 - protein, 213 aa, synthetic construct; identical to SEQ ID NO: 402

SEQ ID NO: 838 - protein, 213 aa, synthetic construct; identical to SEQ ID NO: 402

SEQ ID NO: 839 - protein, 213 aa, synthetic construct; identical to SEQ ID NO: 406

SEQ ID NO: 840 - protein, 441 aa, synthetic construct
QTVVTQEPSLTVSPGGTVTLTCGSSTGAVTSGNYPNWVQQKPGQAPRGLIGGTKFLAPGTPARFSGSLLGGKAALTLSGVQPEDEAEYYCVLWYSNRWVFGGGTKLTVLSSASTKGPSVFPLAPSSKSTSGGTAALGCLVKDYFPEPVTVSWNSGALTSGVHTFPAVLQSSGLYSLSSVVTVPSSSLGTQTYICNVNHKPSNTKVDKKVEPKSCDKTHTCPPCPAPEAAGGPSVFLFPPKPKDTLMISRTPEVTCVVVDVSHEDPEVKFNWYVDGVEVHNAKTKPREEQYNSTYRVVSVLTVLHQDWLNGKEYKCKVSNKALGAPIEKTISKAKGQPREPQVYTLPPCRDELTKNQVSLWCLVKGFYPSDIAVEWESNGQPENNYKTTPPVLDSDGSFFLYSKLTVDKSRWQQGNVFSCSVMHEALHNHYTQKSLSLSPGK

SEQ ID NO: 841 - protein, 439 aa, synthetic construct
DIQMTQSPSFLSASVGDRVTITCKASQNVGINVVWHQQKPGKAPKALIYSSSHRYSGVPSRFSGSGSGTEFTLTISSLQPEDFATYFCQQFKSYPLTFGQGTKLEIKSSASTKGPSVFPLAPSSKSTSGGTAALGCLVKDYFPEPVTVSWNSGALTSGVHTFPAVLQSSGLYSLSSVVTVPSSSLGTQTYICNVNHKPSNTKVDKKVEPKSCDKTHTCPPCPAPEAAGGPSVFLFPPKPKDTLMISRTPEVTCVVVDVSHEDPEVKFNWYVDGVEVHNAKTKPREEQYNSTYRVVSVLTVLHQDWLNGKEYKCKVSNKALGAPIEKTISKAKGQPREPQVYTLPPCRDELTKNQVSLWCLVKGFYPSDIAVEWESNGQPENNYKTTPPVLDSDGSFFLYSKLTVDKSRWQQGNVFSCSVMHEALHNHYTQKSLSLSPGK

SEQ ID NO: 842 - protein, 438 aa, synthetic construct
DNQLTQSPSFLSASVGDRVTITCRASSSVNYIYWYQQKPGKAPKLLIYYTSNLAPGVPSRFSGSGSGNEYTLTISSLQPEDFATYYCQQFTSSPFTFGQGTKLEIKSSASTKGPSVFPLAPSSKSTSGGTAALGCLVKDYFPEPVTVSWNSGALTSGVHTFPAVLQSSGLYSLSSVVTVPSSSLGTQTYICNVNHKPSNTKVDKKVEPKSCDKTHTCPPCPAPEAAGGPSVFLFPPKPKDTLMISRTPEVTCVVVDVSHEDPEVKFNWYVDGVEVHNAKTKPREEQYNSTYRVVSVLTVLHQDWLNGKEYKCKVSNKALGAPIEKTISKAKGQPREPQVYTLPPCRDELTKNQVSLWCLVKGFYPSDIAVEWESNGQPENNYKTTPPVLDSDGSFFLYSKLTVDKSRWQQGNVFSCSVMHEALHNHYTQKSLSLSPGK

SEQ ID NO: 843 - protein, 443 aa, synthetic construct
DIVLTQSPASLAVSLGQRATISCRASKSVSILGTHLIHWYQQKPGQPPKLLIYAASNLESGVPARFSGSGSETVFTLNIHPVEEEDAATYFCQQSIEDPWTFGGGTKLGIKSSASTKGPSVFPLAPSSKSTSGGTAALGCLVKDYFPEPVTVSWNSGALTSGVHTFPAVLQSSGLYSLSSVVTVPSSSLGTQTYICNVNHKPSNTKVDKKVEPKSCDKTHTCPPCPAPEAAGGPSVFLFPPKPKDTLMISRTPEVTCVVVDVSHEDPEVKFNWYVDGVEVHNAKTKPREEQYNSTYRVVSVLTVLHQDWLNGKEYKCKVSNKALGAPIEKTISKAKGQPREPQVYTLPPCRDELTKNQVSLWCLVKGFYPSDIAVEWESNGQPENNYKTTPPVLDSDGSFFLYSKLTVDKSRWQQGNVFSCSVMHEALHNHYTQKSLSLSPGK

SEQ ID NO: 844 - protein, 441 aa, synthetic construct; identical to SEQ ID NO: 840

SEQ ID NO: 845 - protein, 439 aa, synthetic construct; identical to SEQ ID NO: 841

SEQ ID NO: 846 - protein, 438 aa, synthetic construct; identical to SEQ ID NO: 842

SEQ ID NO: 847 - protein, 443 aa, synthetic construct; identical to SEQ ID NO: 843

SEQ ID NO: 848 - protein, 439 aa, synthetic construct
DIVMTQSQKFLSTSVGDRVSVTCKARQNVGSNVAWYQQKPGQSPKSLIYSSSFRYSGVPDRFTGSGSGTDFTLTISNVQSEDLAEYFCQQYNTYPYTFGGGTELEIKSSASTKGPSVFPLAPSSKSTSGGTAALGCLVKDYFPEPVTVSWNSGALTSGVHTFPAVLQSSGLYSLSSVVTVPSSSLGTQTYICNVNHKPSNTKVDKKVEPKSCDKTHTCPPCPAPEAAGGPSVFLFPPKPKDTLMISRTPEVTCVVVDVSHEDPEVKFNWYVDGVEVHNAKTKPREEQYNSTYRVVSVLTVLHQDWLNGKEYKCKVSNKALGAPIEKTISKAKGQPREPQVYTLPPCRDELTKNQVSLWCLVKGFYPSDIAVEWESNGQPENNYKTTPPVLDSDGSFFLYSKLTVDKSRWQQGNVFSCSVMHEALHNHYTQKSLSLSPGK

SEQ ID NO: 849 - protein, 451 aa, synthetic construct
QVQLVQSGAEVKKPGSSVKVSCKASGYSFTTYYIHWVRQAPGQGLEWMGWFFPGSGNIKYNEKFKGRVTITADTSTSTAYMELSSLRSEDTAVYYCAGSYYSYDVLDYWGQGTTVTVSSASVAAPSVFIFPPSDEQLKSGTASVVCLLNNFYPREAKVQWKVDNALQSGNSQESVTEQDSKDSTYSLSSTLTLSKADYEKHKVYACEVTHQGLSSPVTKSFNRGECDKTHTCPPCPAPEAAGGPSVFLFPPKPKDTLMISRTPEVTCVVVDVSHEDPEVKFNWYVDGVEVHNAKTKPREEQYNSTYRVVSVLTVLHQDWLNGKEYKCKVSNKALGAPIEKTISKAKGQPREPQVYTLPPCRDELTKNQVSLWCLVKGFYPSDIAVEWESNGQPENNYKTTPPVLDSDGSFFLYSKLTVDKSRWQQGNVFSCSVMHEALHNHYTQKSLSLSP

SEQ ID NO: 850 - protein, 451 aa, synthetic construct
QVQLVQSGAEVKKPGASVKVSCKASGYSFTTYYIHWVRQAPGQGLEWMGWFFPGSGNIKYNEKFKGRVTITADTSTSTAYMELSSLRSEDTAVYYCAGSYYSYDVLDYWGQGTLVTVSSASVAAPSVFIFPPSDEQLKSGTASVVCLLNNFYPREAKVQWKVDNALQSGNSQESVTEQDSKDSTYSLSSTLTLSKADYEKHKVYACEVTHQGLSSPVTKSFNRGECDKTHTCPPCPAPEAAGGPSVFLFPPKPKDTLMISRTPEVTCVVVDVSHEDPEVKFNWYVDGVEVHNAKTKPREEQYNSTYRVVSVLTVLHQDWLNGKEYKCKVSNKALGAPIEKTISKAKGQPREPQVYTLPPCRDELTKNQVSLWCLVKGFYPSDIAVEWESNGQPENNYKTTPPVLDSDGSFFLYSKLTVDKSRWQQGNVFSCSVMHEALHNHYTQKSLSLSP

SEQ ID NO: 851 - protein, 451 aa, synthetic construct
QVQLVQSGAEVKKPGASVKVSCKASGYSFTTYYIHWVRQAPGQGLEWMGWIFPGSGNIKYNEKFKGRVTITADTSTSTAYMELSSLRSEDTAVYYCAGSYYSYDVLDYWGQGTLVTVSSASVAAPSVFIFPPSDEQLKSGTASVVCLLNNFYPREAKVQWKVDNALQSGNSQESVTEQDSKDSTYSLSSTLTLSKADYEKHKVYACEVTHQGLSSPVTKSFNRGECDKTHTCPPCPAPEAAGGPSVFLFPPKPKDTLMISRTPEVTCVVVDVSHEDPEVKFNWYVDGVEVHNAKTKPREEQYNSTYRVVSVLTVLHQDWLNGKEYKCKVSNKALGAPIEKTISKAKGQPREPQVYTLPPCRDELTKNQVSLWCLVKGFYPSDIAVEWESNGQPENNYKTTPPVLDSDGSFFLYSKLTVDKSRWQQGNVFSCSVMHEALHNHYTQKSLSLSP

SEQ ID NO: 852 - protein, 451 aa, synthetic construct
QVQLVQSGAEVKKPGASVKVSCKASGYSFTTYYIHWVRQAPGQGLEWMGWIYPGSGNIKYNEKFKGRVTITADTSTSTAYMELSSLRSEDTAVYYCAGSYYSYDVLDYWGQGTLVTVSSASVAAPSVFIFPPSDEQLKSGTASVVCLLNNFYPREAKVQWKVDNALQSGNSQESVTEQDSKDSTYSLSSTLTLSKADYEKHKVYACEVTHQGLSSPVTKSFNRGECDKTHTCPPCPAPEAAGGPSVFLFPPKPKDTLMISRTPEVTCVVVDVSHEDPEVKFNWYVDGVEVHNAKTKPREEQYNSTYRVVSVLTVLHQDWLNGKEYKCKVSNKALGAPIEKTISKAKGQPREPQVYTLPPCRDELTKNQVSLWCLVKGFYPSDIAVEWESNGQPENNYKTTPPVLDSDGSFFLYSKLTVDKSRWQQGNVFSCSVMHEALHNHYTQKSLSLSP

SEQ ID NO: 853 - protein, 451 aa, synthetic construct
QVQLVQSGAEVKKPGASVKVSCKASGYSFTTYYIHWVRQAPGQGLEWMGWIYPGSGNIKYNEKFKGRVTITADTSTSTAYMELSSLRSEDTAVYYCARSYYSYDVLDYWGQGTLVTVSSASVAAPSVFIFPPSDEQLKSGTASVVCLLNNFYPREAKVQWKVDNALQSGNSQESVTEQDSKDSTYSLSSTLTLSKADYEKHKVYACEVTHQGLSSPVTKSFNRGECDKTHTCPPCPAPEAAGGPSVFLFPPKPKDTLMISRTPEVTCVVVDVSHEDPEVKFNWYVDGVEVHNAKTKPREEQYNSTYRVVSVLTVLHQDWLNGKEYKCKVSNKALGAPIEKTISKAKGQPREPQVYTLPPCRDELTKNQVSLWCLVKGFYPSDIAVEWESNGQPENNYKTTPPVLDSDGSFFLYSKLTVDKSRWQQGNVFSCSVMHEALHNHYTQKSLSLSP

SEQ ID NO: 854 - protein, 451 aa, synthetic construct; identical to SEQ ID NO: 853

SEQ ID NO: 855 - protein, 451 aa, synthetic construct; identical to SEQ ID NO: 849

SEQ ID NO: 856 - protein, 451 aa, synthetic construct; identical to SEQ ID NO: 850

SEQ ID NO: 857 - protein, 451 aa, synthetic construct; identical to SEQ ID NO: 851

SEQ ID NO: 858 - protein, 451 aa, synthetic construct; identical to SEQ ID NO: 852

SEQ ID NO: 859 - protein, 451 aa, synthetic construct; identical to SEQ ID NO: 853

SEQ ID NO: 860 - protein, 451 aa, synthetic construct; identical to SEQ ID NO: 853

SEQ ID NO: 861 - protein, 449 aa, synthetic construct
EVQLVESGGGLVQPGGSLRLSCAASGFTFSNFGMHWVRQAPGKGLEWVSYISSGSSTIYYADTLKGRFTISRDNSKNTLYLQMNSLRAEDTAVYYCARRGEGAMDYWGQGTTVTVSSASVAAPSVFIFPPSDEQLKSGTASVVCLLNNFYPREAKVQWKVDNALQSGNSQESVTEQDSKDSTYSLSSTLTLSKADYEKHKVYACEVTHQGLSSPVTKSFNRGECDKTHTCPPCPAPEAAGGPSVFLFPPKPKDTLMISRTPEVTCVVVDVSHEDPEVKFNWYVDGVEVHNAKTKPREEQYNSTYRVVSVLTVLHQDWLNGKEYKCKVSNKALGAPIEKTISKAKGQPREPQVYTLPPCRDELTKNQVSLWCLVKGFYPSDIAVEWESNGQPENNYKTTPPVLDSDGSFFLYSKLTVDKSRWQQGNVFSCSVMHEALHNHYTQKSLSLSP

SEQ ID NO: 862 - protein, 449 aa, synthetic construct
EVQLVESGGGLVQPGGSLRLSCAASGFTFSNFGMHWVRQAPGKGLEWVSYISSGSSTIYYADTLKGRFTISRDNSKNTLYLQMNSLRAEDTAVYYCARRGEGAMDYWGQGTLVTVSSASVAAPSVFIFPPSDEQLKSGTASVVCLLNNFYPREAKVQWKVDNALQSGNSQESVTEQDSKDSTYSLSSTLTLSKADYEKHKVYACEVTHQGLSSPVTKSFNRGECDKTHTCPPCPAPEAAGGPSVFLFPPKPKDTLMISRTPEVTCVVVDVSHEDPEVKFNWYVDGVEVHNAKTKPREEQYNSTYRVVSVLTVLHQDWLNGKEYKCKVSNKALGAPIEKTISKAKGQPREPQVYTLPPCRDELTKNQVSLWCLVKGFYPSDIAVEWESNGQPENNYKTTPPVLDSDGSFFLYSKLTVDKSRWQQGNVFSCSVMHEALHNHYTQKSLSLSP

SEQ ID NO: 863 - protein, 449 aa, synthetic construct; identical to SEQ ID NO: 862

SEQ ID NO: 864 - protein, 449 aa, synthetic construct; identical to SEQ ID NO: 862

SEQ ID NO: 865 - protein, 449 aa, synthetic construct; identical to SEQ ID NO: 862

SEQ ID NO: 866 - protein, 449 aa, synthetic construct
EVQLVESGGGLVQPGGSLRLSCAASGFTFSNYGMHWVRQAPGKGLEWVSYISSGSSTIYYADALKGRFTISRDNSKNTLYLQMNSLRAEDTAVYYCARRGEGAMDYWGQGTLVTVSSASVAAPSVFIFPPSDEQLKSGTASVVCLLNNFYPREAKVQWKVDNALQSGNSQESVTEQDSKDSTYSLSSTLTLSKADYEKHKVYACEVTHQGLSSPVTKSFNRGECDKTHTCPPCPAPEAAGGPSVFLFPPKPKDTLMISRTPEVTCVVVDVSHEDPEVKFNWYVDGVEVHNAKTKPREEQYNSTYRVVSVLTVLHQDWLNGKEYKCKVSNKALGAPIEKTISKAKGQPREPQVYTLPPCRDELTKNQVSLWCLVKGFYPSDIAVEWESNGQPENNYKTTPPVLDSDGSFFLYSKLTVDKSRWQQGNVFSCSVMHEALHNHYTQKSLSLSP

SEQ ID NO: 867 - protein, 449 aa, synthetic construct; identical to SEQ ID NO: 861

SEQ ID NO: 868 - protein, 449 aa, synthetic construct; identical to SEQ ID NO: 862

SEQ ID NO: 869 - protein, 449 aa, synthetic construct; identical to SEQ ID NO: 862

SEQ ID NO: 870 - protein, 449 aa, synthetic construct; identical to SEQ ID NO: 862

SEQ ID NO: 871 - protein, 449 aa, synthetic construct; identical to SEQ ID NO: 862

SEQ ID NO: 872 - protein, 449 aa, synthetic construct; identical to SEQ ID NO: 866

SEQ ID NO: 873 - protein, 451 aa, synthetic construct
QVQLVQSGAEVKKPGSSVKVSCKASGYSFTTYYIHWVRQAPGQGLEWMGWFFPGSGNIKYNEKFKGRVTITADTSTSTAYMELSSLRSEDTAVYYCAGSYYSYDVLDYWGQGTTVTVSSASVAAPSVFIFPPSDEQLKSGTASVVCLLNNFYPREAKVQWKVDNALQSGNSQESVTEQDSKDSTYSLSSTLTLSKADYEKHKVYACEVTHQGLSSPVTKSFNRGECDKTHTCPPCPAPEAAGGPSVFLFPPKPKDTLMISRTPEVTCVVVDVSHEDPEVKFNWYVDGVEVHNAKTKPREEQYGSTYRVVSVLTVLHQDWLNGKEYKCKVSNKALGAPIEKTISKAKGQPREPQVYTLPPCRDELTKNQVSLWCLVKGFYPSDIAVEWESNGQPENNYKTTPPVLDSDGSFFLYSKLTVDKSRWQQGNVFSCSVMHEALHNHYTQKSLSLSP

SEQ ID NO: 874 - protein, 449 aa, synthetic construct
EVQLVESGGGLVQPGGSLRLSCAASGFTFSNFGMHWVRQAPGKGLEWVSYISSGSSTIYYADTLKGRFTISRDNSKNTLYLQMNSLRAEDTAVYYCARRGEGAMDYWGQGTTVTVSSASVAAPSVFIFPPSDEQLKSGTASVVCLLNNFYPREAKVQWKVDNALQSGNSQESVTEQDSKDSTYSLSSTLTLSKADYEKHKVYACEVTHQGLSSPVTKSFNRGECDKTHTCPPCPAPEAAGGPSVFLFPPKPKDTLMISRTPEVTCVVVDVSHEDPEVKFNWYVDGVEVHNAKTKPREEQYGSTYRVVSVLTVLHQDWLNGKEYKCKVSNKALGAPIEKTISKAKGQPREPQVYTLPPCRDELTKNQVSLWCLVKGFYPSDIAVEWESNGQPENNYKTTPPVLDSDGSFFLYSKLTVDKSRWQQGNVFSCSVMHEALHNHYTQKSLSLSP

SEQ ID NO: 875 - protein, 457 aa, synthetic construct
EVQLVESGGGLVQPGGSLKLSCAASGFTFNKYAMNWVRQAPGKGLEWVARIRSKYNNYATYYADSVKDRFTISRDDSKNTAYLQMNNLKTEDTAVYYCVRHGNFGNSYISYWAYWGQGTLVTVSSASVAAPSVFIFPPSDEQLKSGTASVVCLLNNFYPREAKVQWKVDNALQSGNSQESVTEQDSKDSTYSLSSTLTLSKADYEKHKVYACEVTHQGLSSPVTKSFNRGECDKTHTCPPCPAPEAAGGPSVFLFPPKPKDTLMISRTPEVTCVVVDVSHEDPEVKFNWYVDGVEVHNAKTKPREEQYGSTYRVVSVLTVLHQDWLNGKEYKCKVSNKALGAPIEKTISKAKGQPREPQVYTLPPCRDELTKNQVSLWCLVKGFYPSDIAVEWESNGQPENNYKTTPPVLDSDGSFFLYSKLTVDKSRWQQGNVFSCSVMHEALHNHYTQKSLSLSP

SEQ ID NO: 876 - protein, 672 aa, synthetic construct
EVQLVESGGGLVKPGGSLKLSCAASGYTFTSYVMHWVRQAPGKGLEWIGYINPYNDGTKYNEKFQGRVTISSDKSISTAYMELSSLRSEDTAMYYCARGTYYYGTRVFDYWGQGTLVTVSSASTKGPSVFPLAPSSKSTSGGTAALGCLVEDYFPEPVTVSWNSGALTSGVHTFPAVLQSSGLYSLSSVVTVPSSSLGTQTYICNVNHKPSNTKVDEKVEPKSCDGGGGSGGGGSDIQMTQSPSFLSASVGDRVTITCKASQNVGINVVWHQQKPGKAPKALIYSSSHRYSGVPSRFSGSGSGTEFTLTISSLQPEDFATYFCQQFKSYPLTFGQGTKLEIKSSASTKGPSVFPLAPSSKSTSGGTAALGCLVKDYFPEPVTVSWNSGALTSGVHTFPAVLQSSGLYSLSSVVTVPSSSLGTQTYICNVNHKPSNTKVDKKVEPKSCDKTHTCPPCPAPEAAGGPSVFLFPPKPKDTLMISRTPEVTCVVVDVSHEDPEVKFNWYVDGVEVHNAKTKPREEQYGSTYRVVSVLTVLHQDWLNGKEYKCKVSNKALGAPIEKTISKAKGQPREPQVYTLPPCRDELTKNQVSLWCLVKGFYPSDIAVEWESNGQPENNYKTTPPVLDSDGSFFLYSKLTVDKSRWQQGNVFSCSVMHEALHNHYTQKSLSLSP

SEQ ID NO: 877 - protein, 672 aa, synthetic construct
EVQLVESGGGLVKPGGSLKLSCAASGYTFTSYVMHWVRQAPGKGLEWIGYINPYNDGTKYNEKFQGRVTISSDKSISTAYMELSSLRSEDTAMYYCARGTYYYGTRVFDYWGQGTLVTVSSASTKGPSVFPLAPSSKSTSGGTAALGCLVEDYFPEPVTVSWNSGALTSGVHTFPAVLQSSGLYSLSSVVTVPSSSLGTQTYICNVNHKPSNTKVDEKVEPKSCDGGGGSGGGGSDIQMTQSPSFLSASVGDRVTITCKASQNVADRVVWHQQKPGKAPKALIYSSSHRYKGVPSRFSGSGSGTEFTLTISSLQPEDFATYFCQQFKSYPLTFGQGTKLEIKSSASTKGPSVFPLAPSSKSTSGGTAALGCLVKDYFPEPVTVSWNSGALTSGVHTFPAVLQSSGLYSLSSVVTVPSSSLGTQTYICNVNHKPSNTKVDKKVEPKSCDKTHTCPPCPAPEAAGGPSVFLFPPKPKDTLMISRTPEVTCVVVDVSHEDPEVKFNWYVDGVEVHNAKTKPREEQYGSTYRVVSVLTVLHQDWLNGKEYKCKVSNKALGAPIEKTISKAKGQPREPQVYTLPPCRDELTKNQVSLWCLVKGFYPSDIAVEWESNGQPENNYKTTPPVLDSDGSFFLYSKLTVDKSRWQQGNVFSCSVMHEALHNHYTQKSLSLSP

SEQ ID NO: 878 - protein, 671 aa, synthetic construct
EVQLVESGGGLVKPGGSLKLSCAASGYTFTSYVMHWVRQAPGKGLEWIGYINPYNDGTKYNEKFQGRVTISSDKSISTAYMELSSLRSEDTAMYYCARGTYYYGTRVFDYWGQGTLVTVSSASTKGPSVFPLAPSSKSTSGGTAALGCLVEDYFPEPVTVSWNSGALTSGVHTFPAVLQSSGLYSLSSVVTVPSSSLGTQTYICNVNHKPSNTKVDEKVEPKSCDGGGGSGGGGSDNQLTQSPSFLSASVGDRVTITCRASSSVNYIYWYQQKPGKAPKLLIYYTSNLAPGVPSRFSGSGSGNEYTLTISSLQPEDFATYYCQQFTSSPFTFGQGTKLEIKSSASTKGPSVFPLAPSSKSTSGGTAALGCLVKDYFPEPVTVSWNSGALTSGVHTFPAVLQSSGLYSLSSVVTVPSSSLGTQTYICNVNHKPSNTKVDKKVEPKSCDKTHTCPPCPAPEAAGGPSVFLFPPKPKDTLMISRTPEVTCVVVDVSHEDPEVKFNWYVDGVEVHNAKTKPREEQYGSTYRVVSVLTVLHQDWLNGKEYKCKVSNKALGAPIEKTISKAKGQPREPQVYTLPPCRDELTKNQVSLWCLVKGFYPSDIAVEWESNGQPENNYKTTPPVLDSDGSFFLYSKLTVDKSRWQQGNVFSCSVMHEALHNHYTQKSLSLSP

SEQ ID NO: 879 - protein, 674 aa, synthetic construct
EVQLVESGGGLVKPGGSLKLSCAASGYTFTSYVMHWVRQAPGKGLEWIGYINPYNDGTKYNEKFQGRVTISSDKSISTAYMELSSLRSEDTAMYYCARGTYYYGTRVFDYWGQGTLVTVSSASTKGPSVFPLAPSSKSTSGGTAALGCLVEDYFPEPVTVSWNSGALTSGVHTFPAVLQSSGLYSLSSVVTVPSSSLGTQTYICNVNHKPSNTKVDEKVEPKSCDGGGGSGGGGSQTVVTQEPSLTVSPGGTVTLTCGSSTGAVTSGNYPNWVQQKPGQAPRGLIGGTKFLAPGTPARFSGSLLGGKAALTLSGVQPEDEAEYYCVLWYSNRWVFGGGTKLTVLSSASTKGPSVFPLAPSSKSTSGGTAALGCLVKDYFPEPVTVSWNSGALTSGVHTFPAVLQSSGLYSLSSVVTVPSSSLGTQTYICNVNHKPSNTKVDKKVEPKSCDKTHTCPPCPAPEAAGGPSVFLFPPKPKDTLMISRTPEVTCVVVDVSHEDPEVKFNWYVDGVEVHNAKTKPREEQYGSTYRVVSVLTVLHQDWLNGKEYKCKVSNKALGAPIEKTISKAKGQPREPQVYTLPPCRDELTKNQVSLWCLVKGFYPSDIAVEWESNGQPENNYKTTPPVLDSDGSFFLYSKLTVDKSRWQQGNVFSCSVMHEALHNHYTQKSLSLSP

SEQ ID NO: 880 - protein, 675 aa, synthetic construct
QVQLQQSGAELVRPGSSVKISCKASGYAFSSYWMNWVKQRPGQGLEWIGQIWPGDGDTNYNGKFKGKATLTADESSSTAYMQLSSLASEDSAVYFCARRETTTVGRYYYAMDYWGQGTTVTVSSASTKGPSVFPLAPSSKSTSGGTAALGCLVEDYFPEPVTVSWNSGALTSGVHTFPAVLQSSGLYSLSSVVTVPSSSLGTQTYICNVNHKPSNTKVDEKVEPKSCDGGGGSGGGGSDIQMTQSPSFLSASVGDRVTITCKASQNVGINVVWHQQKPGKAPKALIYSSSHRYSGVPSRFSGSGSGTEFTLTISSLQPEDFATYFCQQFKSYPLTFGQGTKLEIKSSASTKGPSVFPLAPSSKSTSGGTAALGCLVKDYFPEPVTVSWNSGALTSGVHTFPAVLQSSGLYSLSSVVTVPSSSLGTQTYICNVNHKPSNTKVDKKVEPKSCDKTHTCPPCPAPEAAGGPSVFLFPPKPKDTLMISRTPEVTCVVVDVSHEDPEVKFNWYVDGVEVHNAKTKPREEQYGSTYRVVSVLTVLHQDWLNGKEYKCKVSNKALGAPIEKTISKAKGQPREPQVYTLPPCRDELTKNQVSLWCLVKGFYPSDIAVEWESNGQPENNYKTTPPVLDSDGSFFLYSKLTVDKSRWQQGNVFSCSVMHEALHNHYTQKSLSLSP

SEQ ID NO: 881 - protein, 675 aa, synthetic construct
QVQLQQSGAELVRPGSSVKISCKASGYAFSSYWMNWVKQRPGQGLEWIGQIWPGDGDTNYNGKFKGKATLTADESSSTAYMQLSSLASEDSAVYFCARRETTTVGRYYYAMDYWGQGTTVTVSSASTKGPSVFPLAPSSKSTSGGTAALGCLVEDYFPEPVTVSWNSGALTSGVHTFPAVLQSSGLYSLSSVVTVPSSSLGTQTYICNVNHKPSNTKVDEKVEPKSCDGGGGSGGGGSDIQMTQSPSFLSASVGDRVTITCKASQNVADRVVWHQQKPGKAPKALIYSSSHRYKGVPSRFSGSGSGTEFTLTISSLQPEDFATYFCQQFKSYPLTFGQGTKLEIKSSASTKGPSVFPLAPSSKSTSGGTAALGCLVKDYFPEPVTVSWNSGALTSGVHTFPAVLQSSGLYSLSSVVTVPSSSLGTQTYICNVNHKPSNTKVDKKVEPKSCDKTHTCPPCPAPEAAGGPSVFLFPPKPKDTLMISRTPEVTCVVVDVSHEDPEVKFNWYVDGVEVHNAKTKPREEQYGSTYRVVSVLTVLHQDWLNGKEYKCKVSNKALGAPIEKTISKAKGQPREPQVYTLPPCRDELTKNQVSLWCLVKGFYPSDIAVEWESNGQPENNYKTTPPVLDSDGSFFLYSKLTVDKSRWQQGNVFSCSVMHEALHNHYTQKSLSLSP

SEQ ID NO: 882 - protein, 674 aa, synthetic construct
QVQLQQSGAELVRPGSSVKISCKASGYAFSSYWMNWVKQRPGQGLEWIGQIWPGDGDTNYNGKFKGKATLTADESSSTAYMQLSSLASEDSAVYFCARRETTTVGRYYYAMDYWGQGTTVTVSSASTKGPSVFPLAPSSKSTSGGTAALGCLVEDYFPEPVTVSWNSGALTSGVHTFPAVLQSSGLYSLSSVVTVPSSSLGTQTYICNVNHKPSNTKVDEKVEPKSCDGGGGSGGGGSDNQLTQSPSFLSASVGDRVTITCRASSSVNYIYWYQQKPGKAPKLLIYYTSNLAPGVPSRFSGSGSGNEYTLTISSLQPEDFATYYCQQFTSSPFTFGQGTKLEIKSSASTKGPSVFPLAPSSKSTSGGTAALGCLVKDYFPEPVTVSWNSGALTSGVHTFPAVLQSSGLYSLSSVVTVPSSSLGTQTYICNVNHKPSNTKVDKKVEPKSCDKTHTCPPCPAPEAAGGPSVFLFPPKPKDTLMISRTPEVTCVVVDVSHEDPEVKFNWYVDGVEVHNAKTKPREEQYGSTYRVVSVLTVLHQDWLNGKEYKCKVSNKALGAPIEKTISKAKGQPREPQVYTLPPCRDELTKNQVSLWCLVKGFYPSDIAVEWESNGQPENNYKTTPPVLDSDGSFFLYSKLTVDKSRWQQGNVFSCSVMHEALHNHYTQKSLSLSP

SEQ ID NO: 883 - protein, 677 aa, synthetic construct
QVQLQQSGAELVRPGSSVKISCKASGYAFSSYWMNWVKQRPGQGLEWIGQIWPGDGDTNYNGKFKGKATLTADESSSTAYMQLSSLASEDSAVYFCARRETTTVGRYYYAMDYWGQGTTVTVSSASTKGPSVFPLAPSSKSTSGGTAALGCLVEDYFPEPVTVSWNSGALTSGVHTFPAVLQSSGLYSLSSVVTVPSSSLGTQTYICNVNHKPSNTKVDEKVEPKSCDGGGGSGGGGSQTVVTQEPSLTVSPGGTVTLTCGSSTGAVTSGNYPNWVQQKPGQAPRGLIGGTKFLAPGTPARFSGSLLGGKAALTLSGVQPEDEAEYYCVLWYSNRWVFGGGTKLTVLSSASTKGPSVFPLAPSSKSTSGGTAALGCLVKDYFPEPVTVSWNSGALTSGVHTFPAVLQSSGLYSLSSVVTVPSSSLGTQTYICNVNHKPSNTKVDKKVEPKSCDKTHTCPPCPAPEAAGGPSVFLFPPKPKDTLMISRTPEVTCVVVDVSHEDPEVKFNWYVDGVEVHNAKTKPREEQYGSTYRVVSVLTVLHQDWLNGKEYKCKVSNKALGAPIEKTISKAKGQPREPQVYTLPPCRDELTKNQVSLWCLVKGFYPSDIAVEWESNGQPENNYKTTPPVLDSDGSFFLYSKLTVDKSRWQQGNVFSCSVMHEALHNHYTQKSLSLSP

SEQ ID NO: 884 - protein, 672 aa, synthetic construct
DIQMTQSPSFLSASVGDRVTITCKASQNVGINVVWHQQKPGKAPKALIYSSSHRYSGVPSRFSGSGSGTEFTLTISSLQPEDFATYFCQQFKSYPLTFGQGTKLEIKSSASTKGPSVFPLAPSSKSTSGGTAALGCLVKDYFPEPVTVSWNSGALTSGVHTFPAVLQSSGLYSLSSVVTVPSSSLGTQTYICNVNHKPSNTKVDKKVEPKSCDGGGGSGGGGSEVQLVESGGGLVKPGGSLKLSCAASGYTFTSYVMHWVRQAPGKGLEWIGYINPYNDGTKYNEKFQGRVTISSDKSISTAYMELSSLRSEDTAMYYCARGTYYYGTRVFDYWGQGTLVTVSSASTKGPSVFPLAPSSKSTSGGTAALGCLVEDYFPEPVTVSWNSGALTSGVHTFPAVLQSSGLYSLSSVVTVPSSSLGTQTYICNVNHKPSNTKVDEKVEPKSCDKTHTCPPCPAPEAAGGPSVFLFPPKPKDTLMISRTPEVTCVVVDVSHEDPEVKFNWYVDGVEVHNAKTKPREEQYGSTYRVVSVLTVLHQDWLNGKEYKCKVSNKALGAPIEKTISKAKGQPREPQVYTLPPCRDELTKNQVSLWCLVKGFYPSDIAVEWESNGQPENNYKTTPPVLDSDGSFFLYSKLTVDKSRWQQGNVFSCSVMHEALHNHYTQKSLSLSP

SEQ ID NO: 885 - protein, 672 aa, synthetic construct
DIQMTQSPSFLSASVGDRVTITCKASQNVADRVVWHQQKPGKAPKALIYSSSHRYKGVPSRFSGSGSGTEFTLTISSLQPEDFATYFCQQFKSYPLTFGQGTKLEIKSSASTKGPSVFPLAPSSKSTSGGTAALGCLVKDYFPEPVTVSWNSGALTSGVHTFPAVLQSSGLYSLSSVVTVPSSSLGTQTYICNVNHKPSNTKVDKKVEPKSCDGGGGSGGGGSEVQLVESGGGLVKPGGSLKLSCAASGYTFTSYVMHWVRQAPGKGLEWIGYINPYNDGTKYNEKFQGRVTISSDKSISTAYMELSSLRSEDTAMYYCARGTYYYGTRVFDYWGQGTLVTVSSASTKGPSVFPLAPSSKSTSGGTAALGCLVEDYFPEPVTVSWNSGALTSGVHTFPAVLQSSGLYSLSSVVTVPSSSLGTQTYICNVNHKPSNTKVDEKVEPKSCDKTHTCPPCPAPEAAGGPSVFLFPPKPKDTLMISRTPEVTCVVVDVSHEDPEVKFNWYVDGVEVHNAKTKPREEQYGSTYRVVSVLTVLHQDWLNGKEYKCKVSNKALGAPIEKTISKAKGQPREPQVYTLPPCRDELTKNQVSLWCLVKGFYPSDIAVEWESNGQPENNYKTTPPVLDSDGSFFLYSKLTVDKSRWQQGNVFSCSVMHEALHNHYTQKSLSLSP

SEQ ID NO: 886 - protein, 671 aa, synthetic construct
DNQLTQSPSFLSASVGDRVTITCRASSSVNYIYWYQQKPGKAPKLLIYYTSNLAPGVPSRFSGSGSGNEYTLTISSLQPEDFATYYCQQFTSSPFTFGQGTKLEIKSSASTKGPSVFPLAPSSKSTSGGTAALGCLVKDYFPEPVTVSWNSGALTSGVHTFPAVLQSSGLYSLSSVVTVPSSSLGTQTYICNVNHKPSNTKVDKKVEPKSCDGGGGSGGGGSEVQLVESGGGLVKPGGSLKLSCAASGYTFTSYVMHWVRQAPGKGLEWIGYINPYNDGTKYNEKFQGRVTISSDKSISTAYMELSSLRSEDTAMYYCARGTYYYGTRVFDYWGQGTLVTVSSASTKGPSVFPLAPSSKSTSGGTAALGCLVEDYFPEPVTVSWNSGALTSGVHTFPAVLQSSGLYSLSSVVTVPSSSLGTQTYICNVNHKPSNTKVDEKVEPKSCDKTHTCPPCPAPEAAGGPSVFLFPPKPKDTLMISRTPEVTCVVVDVSHEDPEVKFNWYVDGVEVHNAKTKPREEQYGSTYRVVSVLTVLHQDWLNGKEYKCKVSNKALGAPIEKTISKAKGQPREPQVYTLPPCRDELTKNQVSLWCLVKGFYPSDIAVEWESNGQPENNYKTTPPVLDSDGSFFLYSKLTVDKSRWQQGNVFSCSVMHEALHNHYTQKSLSLSP

SEQ ID NO: 887 - protein, 674 aa, synthetic construct
QTVVTQEPSLTVSPGGTVTLTCGSSTGAVTSGNYPNWVQQKPGQAPRGLIGGTKFLAPGTPARFSGSLLGGKAALTLSGVQPEDEAEYYCVLWYSNRWVFGGGTKLTVLSSASTKGPSVFPLAPSSKSTSGGTAALGCLVKDYFPEPVTVSWNSGALTSGVHTFPAVLQSSGLYSLSSVVTVPSSSLGTQTYICNVNHKPSNTKVDKKVEPKSCDGGGGSGGGGSEVQLVESGGGLVKPGGSLKLSCAASGYTFTSYVMHWVRQAPGKGLEWIGYINPYNDGTKYNEKFQGRVTISSDKSISTAYMELSSLRSEDTAMYYCARGTYYYGTRVFDYWGQGTLVTVSSASTKGPSVFPLAPSSKSTSGGTAALGCLVEDYFPEPVTVSWNSGALTSGVHTFPAVLQSSGLYSLSSVVTVPSSSLGTQTYICNVNHKPSNTKVDEKVEPKSCDKTHTCPPCPAPEAAGGPSVFLFPPKPKDTLMISRTPEVTCVVVDVSHEDPEVKFNWYVDGVEVHNAKTKPREEQYGSTYRVVSVLTVLHQDWLNGKEYKCKVSNKALGAPIEKTISKAKGQPREPQVYTLPPCRDELTKNQVSLWCLVKGFYPSDIAVEWESNGQPENNYKTTPPVLDSDGSFFLYSKLTVDKSRWQQGNVFSCSVMHEALHNHYTQKSLSLSP

SEQ ID NO: 888 - protein, 675 aa, synthetic construct
DIQMTQSPSFLSASVGDRVTITCKASQNVGINVVWHQQKPGKAPKALIYSSSHRYSGVPSRFSGSGSGTEFTLTISSLQPEDFATYFCQQFKSYPLTFGQGTKLEIKSSASTKGPSVFPLAPSSKSTSGGTAALGCLVKDYFPEPVTVSWNSGALTSGVHTFPAVLQSSGLYSLSSVVTVPSSSLGTQTYICNVNHKPSNTKVDKKVEPKSCDGGGGSGGGGSQVQLQQSGAELVRPGSSVKISCKASGYAFSSYWMNWVKQRPGQGLEWIGQIWPGDGDTNYNGKFKGKATLTADESSSTAYMQLSSLASEDSAVYFCARRETTTVGRYYYAMDYWGQGTTVTVSSASTKGPSVFPLAPSSKSTSGGTAALGCLVEDYFPEPVTVSWNSGALTSGVHTFPAVLQSSGLYSLSSVVTVPSSSLGTQTYICNVNHKPSNTKVDEKVEPKSCDKTHTCPPCPAPEAAGGPSVFLFPPKPKDTLMISRTPEVTCVVVDVSHEDPEVKFNWYVDGVEVHNAKTKPREEQYGSTYRVVSVLTVLHQDWLNGKEYKCKVSNKALGAPIEKTISKAKGQPREPQVYTLPPCRDELTKNQVSLWCLVKGFYPSDIAVEWESNGQPENNYKTTPPVLDSDGSFFLYSKLTVDKSRWQQGNVFSCSVMHEALHNHYTQKSLSLSP

SEQ ID NO: 889 - protein, 675 aa, synthetic construct
DIQMTQSPSFLSASVGDRVTITCKASQNVADRVVWHQQKPGKAPKALIYSSSHRYKGVPSRFSGSGSGTEFTLTISSLQPEDFATYFCQQFKSYPLTFGQGTKLEIKSSASTKGPSVFPLAPSSKSTSGGTAALGCLVKDYFPEPVTVSWNSGALTSGVHTFPAVLQSSGLYSLSSVVTVPSSSLGTQTYICNVNHKPSNTKVDKKVEPKSCDGGGGSGGGGSQVQLQQSGAELVRPGSSVKISCKASGYAFSSYWMNWVKQRPGQGLEWIGQIWPGDGDTNYNGKFKGKATLTADESSSTAYMQLSSLASEDSAVYFCARRETTTVGRYYYAMDYWGQGTTVTVSSASTKGPSVFPLAPSSKSTSGGTAALGCLVEDYFPEPVTVSWNSGALTSGVHTFPAVLQSSGLYSLSSVVTVPSSSLGTQTYICNVNHKPSNTKVDEKVEPKSCDKTHTCPPCPAPEAAGGPSVFLFPPKPKDTLMISRTPEVTCVVVDVSHEDPEVKFNWYVDGVEVHNAKTKPREEQYGSTYRVVSVLTVLHQDWLNGKEYKCKVSNKALGAPIEKTISKAKGQPREPQVYTLPPCRDELTKNQVSLWCLVKGFYPSDIAVEWESNGQPENNYKTTPPVLDSDGSFFLYSKLTVDKSRWQQGNVFSCSVMHEALHNHYTQKSLSLSP

SEQ ID NO: 890 - protein, 674 aa, synthetic construct
DNQLTQSPSFLSASVGDRVTITCRASSSVNYIYWYQQKPGKAPKLLIYYTSNLAPGVPSRFSGSGSGNEYTLTISSLQPEDFATYYCQQFTSSPFTFGQGTKLEIKSSASTKGPSVFPLAPSSKSTSGGTAALGCLVKDYFPEPVTVSWNSGALTSGVHTFPAVLQSSGLYSLSSVVTVPSSSLGTQTYICNVNHKPSNTKVDKKVEPKSCDGGGGSGGGGSQVQLQQSGAELVRPGSSVKISCKASGYAFSSYWMNWVKQRPGQGLEWIGQIWPGDGDTNYNGKFKGKATLTADESSSTAYMQLSSLASEDSAVYFCARRETTTVGRYYYAMDYWGQGTTVTVSSASTKGPSVFPLAPSSKSTSGGTAALGCLVEDYFPEPVTVSWNSGALTSGVHTFPAVLQSSGLYSLSSVVTVPSSSLGTQTYICNVNHKPSNTKVDEKVEPKSCDKTHTCPPCPAPEAAGGPSVFLFPPKPKDTLMISRTPEVTCVVVDVSHEDPEVKFNWYVDGVEVHNAKTKPREEQYGSTYRVVSVLTVLHQDWLNGKEYKCKVSNKALGAPIEKTISKAKGQPREPQVYTLPPCRDELTKNQVSLWCLVKGFYPSDIAVEWESNGQPENNYKTTPPVLDSDGSFFLYSKLTVDKSRWQQGNVFSCSVMHEALHNHYTQKSLSLSP

SEQ ID NO: 891 - protein, 677 aa, synthetic construct
QTVVTQEPSLTVSPGGTVTLTCGSSTGAVTSGNYPNWVQQKPGQAPRGLIGGTKFLAPGTPARFSGSLLGGKAALTLSGVQPEDEAEYYCVLWYSNRWVFGGGTKLTVLSSASTKGPSVFPLAPSSKSTSGGTAALGCLVKDYFPEPVTVSWNSGALTSGVHTFPAVLQSSGLYSLSSVVTVPSSSLGTQTYICNVNHKPSNTKVDKKVEPKSCDGGGGSGGGGSQVQLQQSGAELVRPGSSVKISCKASGYAFSSYWMNWVKQRPGQGLEWIGQIWPGDGDTNYNGKFKGKATLTADESSSTAYMQLSSLASEDSAVYFCARRETTTVGRYYYAMDYWGQGTTVTVSSASTKGPSVFPLAPSSKSTSGGTAALGCLVEDYFPEPVTVSWNSGALTSGVHTFPAVLQSSGLYSLSSVVTVPSSSLGTQTYICNVNHKPSNTKVDEKVEPKSCDKTHTCPPCPAPEAAGGPSVFLFPPKPKDTLMISRTPEVTCVVVDVSHEDPEVKFNWYVDGVEVHNAKTKPREEQYGSTYRVVSVLTVLHQDWLNGKEYKCKVSNKALGAPIEKTISKAKGQPREPQVYTLPPCRDELTKNQVSLWCLVKGFYPSDIAVEWESNGQPENNYKTTPPVLDSDGSFFLYSKLTVDKSRWQQGNVFSCSVMHEALHNHYTQKSLSLSP

SEQ ID NO: 892 - protein, 437 aa, synthetic construct
DIQMTQSPSFLSASVGDRVTITCKASQNVGINVVWHQQKPGKAPKALIYSSSHRYSGVPSRFSGSGSGTEFTLTISSLQPEDFATYFCQQFKSYPLTFGQGTKLEIKSSASTKGPSVFPLAPSSKSTSGGTAALGCLVKDYFPEPVTVSWNSGALTSGVHTFPAVLQSSGLYSLSSVVTVPSSSLGTQTYICNVNHKPSNTKVDKKVEPKSCDKTHTCPPCPAPEAAGGPSVFLFPPKPKDTLMISRTPEVTCVVVDVSHEDPEVKFNWYVDGVEVHNAKTKPREEQYGSTYRVVSVLTVLHQDWLNGKEYKCKVSNKALGAPIEKTISKAKGQPREPQVYTLPPCRDELTKNQVSLWCLVKGFYPSDIAVEWESNGQPENNYKTTPPVLDSDGSFFLYSKLTVDKSRWQQGNVFSCSVMHEALHNHYTQKSLSLSP

SEQ ID NO: 893 - protein, 437 aa, synthetic construct
DIQMTQSPSFLSASVGDRVTITCKASQNVADRVVWHQQKPGKAPKALIYSSSHRYKGVPSRFSGSGSGTEFTLTISSLQPEDFATYFCQQFKSYPLTFGQGTKLEIKSSASTKGPSVFPLAPSSKSTSGGTAALGCLVKDYFPEPVTVSWNSGALTSGVHTFPAVLQSSGLYSLSSVVTVPSSSLGTQTYICNVNHKPSNTKVDKKVEPKSCDKTHTCPPCPAPEAAGGPSVFLFPPKPKDTLMISRTPEVTCVVVDVSHEDPEVKFNWYVDGVEVHNAKTKPREEQYGSTYRVVSVLTVLHQDWLNGKEYKCKVSNKALGAPIEKTISKAKGQPREPQVYTLPPCRDELTKNQVSLWCLVKGFYPSDIAVEWESNGQPENNYKTTPPVLDSDGSFFLYSKLTVDKSRWQQGNVFSCSVMHEALHNHYTQKSLSLSP

SEQ ID NO: 894 - protein, 436 aa, synthetic construct
DNQLTQSPSFLSASVGDRVTITCRASSSVNYIYWYQQKPGKAPKLLIYYTSNLAPGVPSRFSGSGSGNEYTLTISSLQPEDFATYYCQQFTSSPFTFGQGTKLEIKSSASTKGPSVFPLAPSSKSTSGGTAALGCLVKDYFPEPVTVSWNSGALTSGVHTFPAVLQSSGLYSLSSVVTVPSSSLGTQTYICNVNHKPSNTKVDKKVEPKSCDKTHTCPPCPAPEAAGGPSVFLFPPKPKDTLMISRTPEVTCVVVDVSHEDPEVKFNWYVDGVEVHNAKTKPREEQYGSTYRVVSVLTVLHQDWLNGKEYKCKVSNKALGAPIEKTISKAKGQPREPQVYTLPPCRDELTKNQVSLWCLVKGFYPSDIAVEWESNGQPENNYKTTPPVLDSDGSFFLYSKLTVDKSRWQQGNVFSCSVMHEALHNHYTQKSLSLSP

SEQ ID NO: 895 - protein, 439 aa, synthetic construct
QTVVTQEPSLTVSPGGTVTLTCGSSTGAVTSGNYPNWVQQKPGQAPRGLIGGTKFLAPGTPARFSGSLLGGKAALTLSGVQPEDEAEYYCVLWYSNRWVFGGGTKLTVLSSASTKGPSVFPLAPSSKSTSGGTAALGCLVKDYFPEPVTVSWNSGALTSGVHTFPAVLQSSGLYSLSSVVTVPSSSLGTQTYICNVNHKPSNTKVDKKVEPKSCDKTHTCPPCPAPEAAGGPSVFLFPPKPKDTLMISRTPEVTCVVVDVSHEDPEVKFNWYVDGVEVHNAKTKPREEQYGSTYRVVSVLTVLHQDWLNGKEYKCKVSNKALGAPIEKTISKAKGQPREPQVYTLPPCRDELTKNQVSLWCLVKGFYPSDIAVEWESNGQPENNYKTTPPVLDSDGSFFLYSKLTVDKSRWQQGNVFSCSVMHEALHNHYTQKSLSLSP

SEQ ID NO: 896 - protein, 437 aa, synthetic construct; identical to SEQ ID NO: 892

SEQ ID NO: 897 - protein, 437 aa, synthetic construct; identical to SEQ ID NO: 893

SEQ ID NO: 898 - protein, 436 aa, synthetic construct; identical to SEQ ID NO: 894

SEQ ID NO: 899 - protein, 439 aa, synthetic construct; identical to SEQ ID NO: 895

SEQ ID NO: 900 - protein, 695 aa, synthetic construct
DIVMTQSPATLSLSPGERATLSCRSSKSLQNVNGNTYLYWFQQKPGQSPQLLIYRMSNLNSGVPDRFSGSGSGTEFTLTISSLEPEDFAVYYCMQHLEYPITFGAGTKLEIKGGGGSGGGGSGGGGSGGGGSEVQLVESGGGLVKPGGSLKLSCAASGYTFTSYVMHWVRQAPGKGLEWIGYINPYNDGTKYNEKFQGRVTISSDKSISTAYMELSSLRSEDTAMYYCARGTYYYGTRVFDYWGQGTLVTVSSGGGGSDIQMTQSPSFLSASVGDRVTITCKASQNVGINVVWHQQKPGKAPKALIYSSSHRYSGVPSRFSGSGSGTEFTLTISSLQPEDFATYFCQQFKSYPLTFGQGTKLEIKSSASTKGPSVFPLAPSSKSTSGGTAALGCLVKDYFPEPVTVSWNSGALTSGVHTFPAVLQSSGLYSLSSVVTVPSSSLGTQTYICNVNHKPSNTKVDKKVEPKSCDKTHTCPPCPAPEAAGGPSVFLFPPKPKDTLMISRTPEVTCVVVDVSHEDPEVKFNWYVDGVEVHNAKTKPREEQYGSTYRVVSVLTVLHQDWLNGKEYKCKVSNKALGAPIEKTISKAKGQPREPQVYTLPPCRDELTKNQVSLWCLVKGFYPSDIAVEWESNGQPENNYKTTPPVLDSDGSFFLYSKLTVDKSRWQQGNVFSCSVMHEALHNHYTQKSLSLSP

SEQ ID NO: 901 - protein, 437 aa, synthetic construct; identical to SEQ ID NO: 892

SEQ ID NO: 902 - protein, 709 aa, synthetic construct
DIQMTQSPSFLSASVGDRVTITCKASQNVGINVVWHQQKPGKAPKALIYSSSHRYSGVPSRFSGSGSGTEFTLTISSLQPEDFATYFCQQFKSYPLTFGQGTKLEIKSSASTKGPSVFPLAPSSKSTSGGTAALGCLVKDYFPEPVTVSWNSGALTSGVHTFPAVLQSSGLYSLSSVVTVPSSSLGTQTYICNVNHKPSNTKVDKKVEPKSCGGGGSGGGGSDIVMTQSPATLSLSPGERATLSCRSSKSLQNVNGNTYLYWFQQKPGQSPQLLIYRMSNLNSGVPDRFSGSGSGTEFTLTISSLEPEDFAVYYCMQHLEYPITFGAGTKLEIKGGGGSGGGGSGGGGSGGGGSEVQLVESGGGLVKPGGSLKLSCAASGYTFTSYVMHWVRQAPGKGLEWIGYINPYNDGTKYNEKFQGRVTISSDKSISTAYMELSSLRSEDTAMYYCARGTYYYGTRVFDYWGQGTLVTVSSGGGGSGGGGSKTHTCPPCPAPEAAGGPSVFLFPPKPKDTLMISRTPEVTCVVVDVSHEDPEVKFNWYVDGVEVHNAKTKPREEQYGSTYRVVSVLTVLHQDWLNGKEYKCKVSNKALGAPIEKTISKAKGQPREPQVYTLPPCRDELTKNQVSLWCLVKGFYPSDIAVEWESNGQPENNYKTTPPVLDSDGSFFLYSKLTVDKSRWQQGNVFSCSVMHEALHNHYTQKSLSLSP

SEQ ID NO: 903 - protein, 437 aa, synthetic construct; identical to SEQ ID NO: 892

SEQ ID NO: 904 - protein, 695 aa, synthetic construct
DIVMTQSPATLSLSPGERATLSCRSSKSLQNVNGNTYLYWFQQKPGQSPQLLIYRMSNLNSGVPDRFSGSGSGTEFTLTISSLEPEDFAVYYCMQHLEYPITFGAGTKLEIKGGGGSGGGGSGGGGSGGGGSEVQLVESGGGLVKPGGSLKLSCAASGYTFTSYVMHWVRQAPGKGLEWIGYINPYNDGTKYNEKFQGRVTISSDKSISTAYMELSSLRSEDTAMYYCARGTYYYGTRVFDYWGQGTLVTVSSGGGGSDIQMTQSPSFLSASVGDRVTITCKASQNVADRVVWHQQKPGKAPKALIYSSSHRYKGVPSRFSGSGSGTEFTLTISSLQPEDFATYFCQQFKSYPLTFGQGTKLEIKSSASTKGPSVFPLAPSSKSTSGGTAALGCLVKDYFPEPVTVSWNSGALTSGVHTFPAVLQSSGLYSLSSVVTVPSSSLGTQTYICNVNHKPSNTKVDKKVEPKSCDKTHTCPPCPAPEAAGGPSVFLFPPKPKDTLMISRTPEVTCVVVDVSHEDPEVKFNWYVDGVEVHNAKTKPREEQYGSTYRVVSVLTVLHQDWLNGKEYKCKVSNKALGAPIEKTISKAKGQPREPQVYTLPPCRDELTKNQVSLWCLVKGFYPSDIAVEWESNGQPENNYKTTPPVLDSDGSFFLYSKLTVDKSRWQQGNVFSCSVMHEALHNHYTQKSLSLSP

SEQ ID NO: 905 - protein, 437 aa, synthetic construct; identical to SEQ ID NO: 893

SEQ ID NO: 906 - protein, 709 aa, synthetic construct
DIQMTQSPSFLSASVGDRVTITCKASQNVADRVVWHQQKPGKAPKALIYSSSHRYKGVPSRFSGSGSGTEFTLTISSLQPEDFATYFCQQFKSYPLTFGQGTKLEIKSSASTKGPSVFPLAPSSKSTSGGTAALGCLVKDYFPEPVTVSWNSGALTSGVHTFPAVLQSSGLYSLSSVVTVPSSSLGTQTYICNVNHKPSNTKVDKKVEPKSCGGGGSGGGGSDIVMTQSPATLSLSPGERATLSCRSSKSLQNVNGNTYLYWFQQKPGQSPQLLIYRMSNLNSGVPDRFSGSGSGTEFTLTISSLEPEDFAVYYCMQHLEYPITFGAGTKLEIKGGGGSGGGGSGGGGSGGGGSEVQLVESGGGLVKPGGSLKLSCAASGYTFTSYVMHWVRQAPGKGLEWIGYINPYNDGTKYNEKFQGRVTISSDKSISTAYMELSSLRSEDTAMYYCARGTYYYGTRVFDYWGQGTLVTVSSGGGGSGGGGSKTHTCPPCPAPEAAGGPSVFLFPPKPKDTLMISRTPEVTCVVVDVSHEDPEVKFNWYVDGVEVHNAKTKPREEQYGSTYRVVSVLTVLHQDWLNGKEYKCKVSNKALGAPIEKTISKAKGQPREPQVYTLPPCRDELTKNQVSLWCLVKGFYPSDIAVEWESNGQPENNYKTTPPVLDSDGSFFLYSKLTVDKSRWQQGNVFSCSVMHEALHNHYTQKSLSLSP

SEQ ID NO: 907 - protein, 437 aa, synthetic construct; identical to SEQ ID NO: 893

SEQ ID NO: 908 - protein, 697 aa, synthetic construct
DIVMTQSPATLSLSPGERATLSCRSSKSLQNVNGNTYLYWFQQKPGQSPQLLIYRMSNLNSGVPDRFSGSGSGTEFTLTISSLEPEDFAVYYCMQHLEYPITFGAGTKLEIKGGGGSGGGGSGGGGSGGGGSEVQLVESGGGLVKPGGSLKLSCAASGYTFTSYVMHWVRQAPGKGLEWIGYINPYNDGTKYNEKFQGRVTISSDKSISTAYMELSSLRSEDTAMYYCARGTYYYGTRVFDYWGQGTLVTVSSGGGGSQTVVTQEPSLTVSPGGTVTLTCGSSTGAVTSGNYPNWVQQKPGQAPRGLIGGTKFLAPGTPARFSGSLLGGKAALTLSGVQPEDEAEYYCVLWYSNRWVFGGGTKLTVLSSASTKGPSVFPLAPSSKSTSGGTAALGCLVKDYFPEPVTVSWNSGALTSGVHTFPAVLQSSGLYSLSSVVTVPSSSLGTQTYICNVNHKPSNTKVDKKVEPKSCDKTHTCPPCPAPEAAGGPSVFLFPPKPKDTLMISRTPEVTCVVVDVSHEDPEVKFNWYVDGVEVHNAKTKPREEQYGSTYRVVSVLTVLHQDWLNGKEYKCKVSNKALGAPIEKTISKAKGQPREPQVYTLPPCRDELTKNQVSLWCLVKGFYPSDIAVEWESNGQPENNYKTTPPVLDSDGSFFLYSKLTVDKSRWQQGNVFSCSVMHEALHNHYTQKSLSLSP

SEQ ID NO: 909 - protein, 439 aa, synthetic construct; identical to SEQ ID NO: 895

SEQ ID NO: 910 - protein, 711 aa, synthetic construct
QTVVTQEPSLTVSPGGTVTLTCGSSTGAVTSGNYPNWVQQKPGQAPRGLIGGTKFLAPGTPARFSGSLLGGKAALTLSGVQPEDEAEYYCVLWYSNRWVFGGGTKLTVLSSASTKGPSVFPLAPSSKSTSGGTAALGCLVKDYFPEPVTVSWNSGALTSGVHTFPAVLQSSGLYSLSSVVTVPSSSLGTQTYICNVNHKPSNTKVDKKVEPKSCGGGGSGGGGSDIVMTQSPATLSLSPGERATLSCRSSKSLQNVNGNTYLYWFQQKPGQSPQLLIYRMSNLNSGVPDRFSGSGSGTEFTLTISSLEPEDFAVYYCMQHLEYPITFGAGTKLEIKGGGGSGGGGSGGGGSGGGGSEVQLVESGGGLVKPGGSLKLSCAASGYTFTSYVMHWVRQAPGKGLEWIGYINPYNDGTKYNEKFQGRVTISSDKSISTAYMELSSLRSEDTAMYYCARGTYYYGTRVFDYWGQGTLVTVSSGGGGSGGGGSKTHTCPPCPAPEAAGGPSVFLFPPKPKDTLMISRTPEVTCVVVDVSHEDPEVKFNWYVDGVEVHNAKTKPREEQYGSTYRVVSVLTVLHQDWLNGKEYKCKVSNKALGAPIEKTISKAKGQPREPQVYTLPPCRDELTKNQVSLWCLVKGFYPSDIAVEWESNGQPENNYKTTPPVLDSDGSFFLYSKLTVDKSRWQQGNVFSCSVMHEALHNHYTQKSLSLSP

SEQ ID NO: 911 - protein, 439 aa, synthetic construct; identical to SEQ ID NO: 895

SEQ ID NO: 912 - protein, 449 aa, synthetic construct; identical to SEQ ID NO: 812

SEQ ID NO: 913 - protein, 695 aa, synthetic construct
QVQLVQSGAEVKKPGSSVKVSCKASGYSFTTYYIHWVRQAPGQGLEWMGWFFPGSGNIKYNEKFKGRVTITADTSTSTAYMELSSLRSEDTAVYYCAGSYYSYDVLDYWGQGTTVTVSSGGGGSGGGGSGGGGSDIQMTQSPSFLSASVGDRVTITCKASQNVGINVVWHQQKPGKAPKALIYSSSHRYSGVPSRFSGSGSGTEFTLTISSLQPEDFATYFCQQFKSYPLTFGQGTKLEIKGGGGSEVQLVESGGGLVKPGGSLKLSCAASGYTFTSYVMHWVRQAPGKGLEWIGYINPYNDGTKYNEKFQGRVTISSDKSISTAYMELSSLRSEDTAMYYCARGTYYYGTRVFDYWGQGTLVTVSSASTKGPSVFPLAPSSKSTSGGTAALGCLVKDYFPEPVTVSWNSGALTSGVHTFPAVLQSSGLYSLSSVVTVPSSSLGTQTYICNVNHKPSNTKVDKKVEPKSCDKTHTCPPCPAPEAAGGPSVFLFPPKPKDTLMISRTPEVTCVVVDVSHEDPEVKFNWYVDGVEVHNAKTKPREEQYGSTYRVVSVLTVLHQDWLNGKEYKCKVSNKALGAPIEKTISKAKGQPREPQVYTLPPCRDELTKNQVSLWCLVKGFYPSDIAVEWESNGQPENNYKTTPPVLDSDGSFFLYSKLTVDKSRWQQGNVFSCSVMHEALHNHYTQKSLSLSP

SEQ ID NO: 914 - protein, 449 aa, synthetic construct; identical to SEQ ID NO: 812

SEQ ID NO: 915 - protein, 695 aa, synthetic construct
QVQLVQSGAEVKKPGSSVKVSCKASGYSFTTYYIHWVRQAPGQCLEWMGWFFPGSGNIKYNEKFKGRVTITADTSTSTAYMELSSLRSEDTAVYYCAGSYYSYDVLDYWGQGTTVTVSSGGGGSGGGGSGGGGSDIQMTQSPSFLSASVGDRVTITCKASQNVGINVVWHQQKPGKAPKALIYSSSHRYSGVPSRFSGSGSGTEFTLTISSLQPEDFATYFCQQFKSYPLTFGCGTKLEIKGGGGSEVQLVESGGGLVKPGGSLKLSCAASGYTFTSYVMHWVRQAPGKGLEWIGYINPYNDGTKYNEKFQGRVTISSDKSISTAYMELSSLRSEDTAMYYCARGTYYYGTRVFDYWGQGTLVTVSSASTKGPSVFPLAPSSKSTSGGTAALGCLVKDYFPEPVTVSWNSGALTSGVHTFPAVLQSSGLYSLSSVVTVPSSSLGTQTYICNVNHKPSNTKVDKKVEPKSCDKTHTCPPCPAPEAAGGPSVFLFPPKPKDTLMISRTPEVTCVVVDVSHEDPEVKFNWYVDGVEVHNAKTKPREEQYGSTYRVVSVLTVLHQDWLNGKEYKCKVSNKALGAPIEKTISKAKGQPREPQVYTLPPCRDELTKNQVSLWCLVKGFYPSDIAVEWESNGQPENNYKTTPPVLDSDGSFFLYSKLTVDKSRWQQGNVFSCSVMHEALHNHYTQKSLSLSP

SEQ ID NO: 916 - protein, 709 aa, synthetic construct
EVQLVESGGGLVKPGGSLKLSCAASGYTFTSYVMHWVRQAPGKGLEWIGYINPYNDGTKYNEKFQGRVTISSDKSISTAYMELSSLRSEDTAMYYCARGTYYYGTRVFDYWGQGTLVTVSSASTKGPSVFPLAPSSKSTSGGTAALGCLVKDYFPEPVTVSWNSGALTSGVHTFPAVLQSSGLYSLSSVVTVPSSSLGTQTYICNVNHKPSNTKVDKKVEPKSCGGGGSGGGGSQVQLVQSGAEVKKPGSSVKVSCKASGYSFTTYYIHWVRQAPGQGLEWMGWFFPGSGNIKYNEKFKGRVTITADTSTSTAYMELSSLRSEDTAVYYCAGSYYSYDVLDYWGQGTTVTVSSGGGGSGGGGSGGGGSDIQMTQSPSFLSASVGDRVTITCKASQNVGINVVWHQQKPGKAPKALIYSSSHRYSGVPSRFSGSGSGTEFTLTISSLQPEDFATYFCQQFKSYPLTFGQGTKLEIKGGGGSGGGGSKTHTCPPCPAPEAAGGPSVFLFPPKPKDTLMISRTPEVTCVVVDVSHEDPEVKFNWYVDGVEVHNAKTKPREEQYGSTYRVVSVLTVLHQDWLNGKEYKCKVSNKALGAPIEKTISKAKGQPREPQVYTLPPCRDELTKNQVSLWCLVKGFYPSDIAVEWESNGQPENNYKTTPPVLDSDGSFFLYSKLTVDKSRWQQGNVFSCSVMHEALHNHYTQKSLSLSP

SEQ ID NO: 917 - protein, 709 aa, synthetic construct
EVQLVESGGGLVKPGGSLKLSCAASGYTFTSYVMHWVRQAPGKGLEWIGYINPYNDGTKYNEKFQGRVTISSDKSISTAYMELSSLRSEDTAMYYCARGTYYYGTRVFDYWGQGTLVTVSSASTKGPSVFPLAPSSKSTSGGTAALGCLVKDYFPEPVTVSWNSGALTSGVHTFPAVLQSSGLYSLSSVVTVPSSSLGTQTYICNVNHKPSNTKVDKKVEPKSCGGGGSGGGGSQVQLVQSGAEVKKPGSSVKVSCKASGYSFTTYYIHWVRQAPGQCLEWMGWFFPGSGNIKYNEKFKGRVTITADTSTSTAYMELSSLRSEDTAVYYCAGSYYSYDVLDYWGQGTTVTVSSGGGGSGGGGSGGGGSDIQMTQSPSFLSASVGDRVTITCKASQNVGINVVWHQQKPGKAPKALIYSSSHRYSGVPSRFSGSGSGTEFTLTISSLQPEDFATYFCQQFKSYPLTFGCGTKLEIKGGGGSGGGGSKTHTCPPCPAPEAAGGPSVFLFPPKPKDTLMISRTPEVTCVVVDVSHEDPEVKFNWYVDGVEVHNAKTKPREEQYGSTYRVVSVLTVLHQDWLNGKEYKCKVSNKALGAPIEKTISKAKGQPREPQVYTLPPCRDELTKNQVSLWCLVKGFYPSDIAVEWESNGQPENNYKTTPPVLDSDGSFFLYSKLTVDKSRWQQGNVFSCSVMHEALHNHYTQKSLSLSP

SEQ ID NO: 918 - protein, 452 aa, synthetic construct
QVQLQQSGAELVRPGSSVKISCKASGYAFSSYWMNWVKQRPGQGLEWIGQIWPGDGDTNYNGKFKGKATLTADESSSTAYMQLSSLASEDSAVYFCARRETTTVGRYYYAMDYWGQGTTVTVSSASTKGPSVFPLAPSSKSTSGGTAALGCLVKDYFPEPVTVSWNSGALTSGVHTFPAVLQSSGLYSLSSVVTVPSSSLGTQTYICNVNHKPSNTKVDKKVEPKSCDKTHTCPPCPAPEAAGGPSVFLFPPKPKDTLMISRTPEVTCVVVDVSHEDPEVKFNWYVDGVEVHNAKTKPREEQYGSTYRVVSVLTVLHQDWLNGKEYKCKVSNKALGAPIEKTISKAKGQPREPQVYTLPPCRDELTKNQVSLWCLVKGFYPSDIAVEWESNGQPENNYKTTPPVLDSDGSFFLYSKLTVDKSRWQQGNVFSCSVMHEALHNHYTQKSLSLSP

SEQ ID NO: 919 - protein, 698 aa, synthetic construct
QVQLVQSGAEVKKPGSSVKVSCKASGYSFTTYYIHWVRQAPGQGLEWMGWFFPGSGNIKYNEKFKGRVTITADTSTSTAYMELSSLRSEDTAVYYCAGSYYSYDVLDYWGQGTTVTVSSGGGGSGGGGSGGGGSDIQMTQSPSFLSASVGDRVTITCKASQNVGINVVWHQQKPGKAPKALIYSSSHRYSGVPSRFSGSGSGTEFTLTISSLQPEDFATYFCQQFKSYPLTFGQGTKLEIKGGGGSQVQLQQSGAELVRPGSSVKISCKASGYAFSSYWMNWVKQRPGQGLEWIGQIWPGDGDTNYNGKFKGKATLTADESSSTAYMQLSSLASEDSAVYFCARRETTTVGRYYYAMDYWGQGTTVTVSSASTKGPSVFPLAPSSKSTSGGTAALGCLVKDYFPEPVTVSWNSGALTSGVHTFPAVLQSSGLYSLSSVVTVPSSSLGTQTYICNVNHKPSNTKVDKKVEPKSCDKTHTCPPCPAPEAAGGPSVFLFPPKPKDTLMISRTPEVTCVVVDVSHEDPEVKFNWYVDGVEVHNAKTKPREEQYGSTYRVVSVLTVLHQDWLNGKEYKCKVSNKALGAPIEKTISKAKGQPREPQVYTLPPCRDELTKNQVSLWCLVKGFYPSDIAVEWESNGQPENNYKTTPPVLDSDGSFFLYSKLTVDKSRWQQGNVFSCSVMHEALHNHYTQKSLSLSP

SEQ ID NO: 920 - protein, 452 aa, synthetic construct; identical to SEQ ID NO: 918

SEQ ID NO: 921 - protein, 698 aa, synthetic construct
QVQLVQSGAEVKKPGSSVKVSCKASGYSFTTYYIHWVRQAPGQCLEWMGWFFPGSGNIKYNEKFKGRVTITADTSTSTAYMELSSLRSEDTAVYYCAGSYYSYDVLDYWGQGTTVTVSSGGGGSGGGGSGGGGSDIQMTQSPSFLSASVGDRVTITCKASQNVGINVVWHQQKPGKAPKALIYSSSHRYSGVPSRFSGSGSGTEFTLTISSLQPEDFATYFCQQFKSYPLTFGCGTKLEIKGGGGSQVQLQQSGAELVRPGSSVKISCKASGYAFSSYWMNWVKQRPGQGLEWIGQIWPGDGDTNYNGKFKGKATLTADESSSTAYMQLSSLASEDSAVYFCARRETTTVGRYYYAMDYWGQGTTVTVSSASTKGPSVFPLAPSSKSTSGGTAALGCLVKDYFPEPVTVSWNSGALTSGVHTFPAVLQSSGLYSLSSVVTVPSSSLGTQTYICNVNHKPSNTKVDKKVEPKSCDKTHTCPPCPAPEAAGGPSVFLFPPKPKDTLMISRTPEVTCVVVDVSHEDPEVKFNWYVDGVEVHNAKTKPREEQYGSTYRVVSVLTVLHQDWLNGKEYKCKVSNKALGAPIEKTISKAKGQPREPQVYTLPPCRDELTKNQVSLWCLVKGFYPSDIAVEWESNGQPENNYKTTPPVLDSDGSFFLYSKLTVDKSRWQQGNVFSCSVMHEALHNHYTQKSLSLSP

SEQ ID NO: 922 - protein, 712 aa, synthetic construct
QVQLQQSGAELVRPGSSVKISCKASGYAFSSYWMNWVKQRPGQGLEWIGQIWPGDGDTNYNGKFKGKATLTADESSSTAYMQLSSLASEDSAVYFCARRETTTVGRYYYAMDYWGQGTTVTVSSASTKGPSVFPLAPSSKSTSGGTAALGCLVKDYFPEPVTVSWNSGALTSGVHTFPAVLQSSGLYSLSSVVTVPSSSLGTQTYICNVNHKPSNTKVDKKVEPKSCGGGGSGGGGSQVQLVQSGAEVKKPGSSVKVSCKASGYSFTTYYIHWVRQAPGQGLEWMGWFFPGSGNIKYNEKFKGRVTITADTSTSTAYMELSSLRSEDTAVYYCAGSYYSYDVLDYWGQGTTVTVSSGGGGSGGGGSGGGGSDIQMTQSPSFLSASVGDRVTITCKASQNVGINVVWHQQKPGKAPKALIYSSSHRYSGVPSRFSGSGSGTEFTLTISSLQPEDFATYFCQQFKSYPLTFGQGTKLEIKGGGGSGGGGSKTHTCPPCPAPEAAGGPSVFLFPPKPKDTLMISRTPEVTCVVVDVSHEDPEVKFNWYVDGVEVHNAKTKPREEQYGSTYRVVSVLTVLHQDWLNGKEYKCKVSNKALGAPIEKTISKAKGQPREPQVYTLPPCRDELTKNQVSLWCLVKGFYPSDIAVEWESNGQPENNYKTTPPVLDSDGSFFLYSKLTVDKSRWQQGNVFSCSVMHEALHNHYTQKSLSLSP

SEQ ID NO: 923 - protein, 712 aa, synthetic construct
QVQLQQSGAELVRPGSSVKISCKASGYAFSSYWMNWVKQRPGQGLEWIGQIWPGDGDTNYNGKFKGKATLTADESSSTAYMQLSSLASEDSAVYFCARRETTTVGRYYYAMDYWGQGTTVTVSSASTKGPSVFPLAPSSKSTSGGTAALGCLVKDYFPEPVTVSWNSGALTSGVHTFPAVLQSSGLYSLSSVVTVPSSSLGTQTYICNVNHKPSNTKVDKKVEPKSCGGGGSGGGGSQVQLVQSGAEVKKPGSSVKVSCKASGYSFTTYYIHWVRQAPGQCLEWMGWFFPGSGNIKYNEKFKGRVTITADTSTSTAYMELSSLRSEDTAVYYCAGSYYSYDVLDYWGQGTTVTVSSGGGGSGGGGSGGGGSDIQMTQSPSFLSASVGDRVTITCKASQNVGINVVWHQQKPGKAPKALIYSSSHRYSGVPSRFSGSGSGTEFTLTISSLQPEDFATYFCQQFKSYPLTFGCGTKLEIKGGGGSGGGGSKTHTCPPCPAPEAAGGPSVFLFPPKPKDTLMISRTPEVTCVVVDVSHEDPEVKFNWYVDGVEVHNAKTKPREEQYGSTYRVVSVLTVLHQDWLNGKEYKCKVSNKALGAPIEKTISKAKGQPREPQVYTLPPCRDELTKNQVSLWCLVKGFYPSDIAVEWESNGQPENNYKTTPPVLDSDGSFFLYSKLTVDKSRWQQGNVFSCSVMHEALHNHYTQKSLSLSP

SEQ ID NO: 924 - protein, 698 aa, synthetic construct
DIQMTQSPSFLSASVGDRVTITCKASQNVGINVVWHQQKPGKAPKALIYSSSHRYSGVPSRFSGSGSGTEFTLTISSLQPEDFATYFCQQFKSYPLTFGQGTKLEIKGGGGSGGGGSGGGGSQVQLVQSGAEVKKPGSSVKVSCKASGYSFTTYYIHWVRQAPGQGLEWMGWFFPGSGNIKYNEKFKGRVTITADTSTSTAYMELSSLRSEDTAVYYCAGSYYSYDVLDYWGQGTTVTVSSGGGGSQVQLQQSGAELVRPGSSVKISCKASGYAFSSYWMNWVKQRPGQGLEWIGQIWPGDGDTNYNGKFKGKATLTADESSSTAYMQLSSLASEDSAVYFCARRETTTVGRYYYAMDYWGQGTTVTVSSASTKGPSVFPLAPSSKSTSGGTAALGCLVKDYFPEPVTVSWNSGALTSGVHTFPAVLQSSGLYSLSSVVTVPSSSLGTQTYICNVNHKPSNTKVDKKVEPKSCDKTHTCPPCPAPEAAGGPSVFLFPPKPKDTLMISRTPEVTCVVVDVSHEDPEVKFNWYVDGVEVHNAKTKPREEQYGSTYRVVSVLTVLHQDWLNGKEYKCKVSNKALGAPIEKTISKAKGQPREPQVYTLPPCRDELTKNQVSLWCLVKGFYPSDIAVEWESNGQPENNYKTTPPVLDSDGSFFLYSKLTVDKSRWQQGNVFSCSVMHEALHNHYTQKSLSLSP

SEQ ID NO: 925 - protein, 698 aa, synthetic construct
DIQMTQSPSFLSASVGDRVTITCKASQNVGINVVWHQQKPGKAPKALIYSSSHRYSGVPSRFSGSGSGTEFTLTISSLQPEDFATYFCQQFKSYPLTFGCGTKLEIKGGGGSGGGGSGGGGSQVQLVQSGAEVKKPGSSVKVSCKASGYSFTTYYIHWVRQAPGQCLEWMGWFFPGSGNIKYNEKFKGRVTITADTSTSTAYMELSSLRSEDTAVYYCAGSYYSYDVLDYWGQGTTVTVSSGGGGSQVQLQQSGAELVRPGSSVKISCKASGYAFSSYWMNWVKQRPGQGLEWIGQIWPGDGDTNYNGKFKGKATLTADESSSTAYMQLSSLASEDSAVYFCARRETTTVGRYYYAMDYWGQGTTVTVSSASTKGPSVFPLAPSSKSTSGGTAALGCLVKDYFPEPVTVSWNSGALTSGVHTFPAVLQSSGLYSLSSVVTVPSSSLGTQTYICNVNHKPSNTKVDKKVEPKSCDKTHTCPPCPAPEAAGGPSVFLFPPKPKDTLMISRTPEVTCVVVDVSHEDPEVKFNWYVDGVEVHNAKTKPREEQYGSTYRVVSVLTVLHQDWLNGKEYKCKVSNKALGAPIEKTISKAKGQPREPQVYTLPPCRDELTKNQVSLWCLVKGFYPSDIAVEWESNGQPENNYKTTPPVLDSDGSFFLYSKLTVDKSRWQQGNVFSCSVMHEALHNHYTQKSLSLSP

SEQ ID NO: 926 - protein, 698 aa, synthetic construct
QVQLVQSGAEVKKPGSSVKVSCKASGYSFTTYYIHWVRQAPGQGLEWMGWFFPGSGNIKYNEKFKGRVTITADTSTSTAYMELSSLRSEDTAVYYCAGSYYSYDVCDYWGQGTTVTVSSGGGGSGGGGSGGGGSDIQMTQSPSFLSASVGDRVTITCKASQNVGINVVWHQQKPGKAPKALICSSSHRYSGVPSRFSGSGSGTEFTLTISSLQPEDFATYFCQQFKSYPLTFGQGTKLEIKGGGGSQVQLQQSGAELVRPGSSVKISCKASGYAFSSYWMNWVKQRPGQGLEWIGQIWPGDGDTNYNGKFKGKATLTADESSSTAYMQLSSLASEDSAVYFCARRETTTVGRYYYAMDYWGQGTTVTVSSASTKGPSVFPLAPSSKSTSGGTAALGCLVKDYFPEPVTVSWNSGALTSGVHTFPAVLQSSGLYSLSSVVTVPSSSLGTQTYICNVNHKPSNTKVDKKVEPKSCDKTHTCPPCPAPEAAGGPSVFLFPPKPKDTLMISRTPEVTCVVVDVSHEDPEVKFNWYVDGVEVHNAKTKPREEQYGSTYRVVSVLTVLHQDWLNGKEYKCKVSNKALGAPIEKTISKAKGQPREPQVYTLPPCRDELTKNQVSLWCLVKGFYPSDIAVEWESNGQPENNYKTTPPVLDSDGSFFLYSKLTVDKSRWQQGNVFSCSVMHEALHNHYTQKSLSLSP

SEQ ID NO: 927 - protein, 698 aa, synthetic construct
DIQMTQSPSFLSASVGDRVTITCKASQNVGINVVWHQQKPGKAPKALICSSSHRYSGVPSRFSGSGSGTEFTLTISSLQPEDFATYFCQQFKSYPLTFGQGTKLEIKGGGGSGGGGSGGGGSQVQLVQSGAEVKKPGSSVKVSCKASGYSFTTYYIHWVRQAPGQGLEWMGWFFPGSGNIKYNEKFKGRVTITADTSTSTAYMELSSLRSEDTAVYYCAGSYYSYDVCDYWGQGTTVTVSSGGGGSQVQLQQSGAELVRPGSSVKISCKASGYAFSSYWMNWVKQRPGQGLEWIGQIWPGDGDTNYNGKFKGKATLTADESSSTAYMQLSSLASEDSAVYFCARRETTTVGRYYYAMDYWGQGTTVTVSSASTKGPSVFPLAPSSKSTSGGTAALGCLVKDYFPEPVTVSWNSGALTSGVHTFPAVLQSSGLYSLSSVVTVPSSSLGTQTYICNVNHKPSNTKVDKKVEPKSCDKTHTCPPCPAPEAAGGPSVFLFPPKPKDTLMISRTPEVTCVVVDVSHEDPEVKFNWYVDGVEVHNAKTKPREEQYGSTYRVVSVLTVLHQDWLNGKEYKCKVSNKALGAPIEKTISKAKGQPREPQVYTLPPCRDELTKNQVSLWCLVKGFYPSDIAVEWESNGQPENNYKTTPPVLDSDGSFFLYSKLTVDKSRWQQGNVFSCSVMHEALHNHYTQKSLSLSP

SEQ ID NO: 928 - protein, 698 aa, synthetic construct
QVQLVQSGAEVKKPGSSVKVSCKASGYSFTTYYIHWVRQAPGQGLEWMGWFFPGSGNIKYNEKFKGRVTITADTSTSTAYMELSSLRSEDTAVYYCAGSYYSYCVLDYWGQGTTVTVSSGGGGSGGGGSGGGGSDIQMTQSPSFLSASVGDRVTITCKASQNVGINVVWHQQKPGKAPKALIYCSSHRYSGVPSRFSGSGSGTEFTLTISSLQPEDFATYFCQQFKSYPLTFGQGTKLEIKGGGGSQVQLQQSGAELVRPGSSVKISCKASGYAFSSYWMNWVKQRPGQGLEWIGQIWPGDGDTNYNGKFKGKATLTADESSSTAYMQLSSLASEDSAVYFCARRETTTVGRYYYAMDYWGQGTTVTVSSASTKGPSVFPLAPSSKSTSGGTAALGCLVKDYFPEPVTVSWNSGALTSGVHTFPAVLQSSGLYSLSSVVTVPSSSLGTQTYICNVNHKPSNTKVDKKVEPKSCDKTHTCPPCPAPEAAGGPSVFLFPPKPKDTLMISRTPEVTCVVVDVSHEDPEVKFNWYVDGVEVHNAKTKPREEQYGSTYRVVSVLTVLHQDWLNGKEYKCKVSNKALGAPIEKTISKAKGQPREPQVYTLPPCRDELTKNQVSLWCLVKGFYPSDIAVEWESNGQPENNYKTTPPVLDSDGSFFLYSKLTVDKSRWQQGNVFSCSVMHEALHNHYTQKSLSLSP

SEQ ID NO: 929 - protein, 698 aa, synthetic construct
DIQMTQSPSFLSASVGDRVTITCKASQNVGINVVWHQQKPGKAPKALIYCSSHRYSGVPSRFSGSGSGTEFTLTISSLQPEDFATYFCQQFKSYPLTFGQGTKLEIKGGGGSGGGGSGGGGSQVQLVQSGAEVKKPGSSVKVSCKASGYSFTTYYIHWVRQAPGQGLEWMGWFFPGSGNIKYNEKFKGRVTITADTSTSTAYMELSSLRSEDTAVYYCAGSYYSYCVLDYWGQGTTVTVSSGGGGSQVQLQQSGAELVRPGSSVKISCKASGYAFSSYWMNWVKQRPGQGLEWIGQIWPGDGDTNYNGKFKGKATLTADESSSTAYMQLSSLASEDSAVYFCARRETTTVGRYYYAMDYWGQGTTVTVSSASTKGPSVFPLAPSSKSTSGGTAALGCLVKDYFPEPVTVSWNSGALTSGVHTFPAVLQSSGLYSLSSVVTVPSSSLGTQTYICNVNHKPSNTKVDKKVEPKSCDKTHTCPPCPAPEAAGGPSVFLFPPKPKDTLMISRTPEVTCVVVDVSHEDPEVKFNWYVDGVEVHNAKTKPREEQYGSTYRVVSVLTVLHQDWLNGKEYKCKVSNKALGAPIEKTISKAKGQPREPQVYTLPPCRDELTKNQVSLWCLVKGFYPSDIAVEWESNGQPENNYKTTPPVLDSDGSFFLYSKLTVDKSRWQQGNVFSCSVMHEALHNHYTQKSLSLSP

SEQ ID NO: 930 - protein, 698 aa, synthetic construct
QVQLVQSGAEVKKPGSSVKVSCKASGYSFTTYYIHWVRQAPGQGLEWMGWFFPGSGNIKYNEKFKGRVTITADTSTSTAYMELSSLRSEDTAVYYCAGSYYSYDVLDYWGCGTTVTVSSGGGGSGGGGSGGGGSDIQMTQSPSFLSASVGDRVTITCKASQNVGINVVWHQQKPGKCPKALIYSSSHRYSGVPSRFSGSGSGTEFTLTISSLQPEDFATYFCQQFKSYPLTFGQGTKLEIKGGGGSQVQLQQSGAELVRPGSSVKISCKASGYAFSSYWMNWVKQRPGQGLEWIGQIWPGDGDTNYNGKFKGKATLTADESSSTAYMQLSSLASEDSAVYFCARRETTTVGRYYYAMDYWGQGTTVTVSSASTKGPSVFPLAPSSKSTSGGTAALGCLVKDYFPEPVTVSWNSGALTSGVHTFPAVLQSSGLYSLSSVVTVPSSSLGTQTYICNVNHKPSNTKVDKKVEPKSCDKTHTCPPCPAPEAAGGPSVFLFPPKPKDTLMISRTPEVTCVVVDVSHEDPEVKFNWYVDGVEVHNAKTKPREEQYGSTYRVVSVLTVLHQDWLNGKEYKCKVSNKALGAPIEKTISKAKGQPREPQVYTLPPCRDELTKNQVSLWCLVKGFYPSDIAVEWESNGQPENNYKTTPPVLDSDGSFFLYSKLTVDKSRWQQGNVFSCSVMHEALHNHYTQKSLSLSP

SEQ ID NO: 931 - protein, 698 aa, synthetic construct
DIQMTQSPSFLSASVGDRVTITCKASQNVGINVVWHQQKPGKCPKALIYSSSHRYSGVPSRFSGSGSGTEFTLTISSLQPEDFATYFCQQFKSYPLTFGQGTKLEIKGGGGSGGGGSGGGGSQVQLVQSGAEVKKPGSSVKVSCKASGYSFTTYYIHWVRQAPGQGLEWMGWFFPGSGNIKYNEKFKGRVTITADTSTSTAYMELSSLRSEDTAVYYCAGSYYSYDVLDYWGCGTTVTVSSGGGGSQVQLQQSGAELVRPGSSVKISCKASGYAFSSYWMNWVKQRPGQGLEWIGQIWPGDGDTNYNGKFKGKATLTADESSSTAYMQLSSLASEDSAVYFCARRETTTVGRYYYAMDYWGQGTTVTVSSASTKGPSVFPLAPSSKSTSGGTAALGCLVKDYFPEPVTVSWNSGALTSGVHTFPAVLQSSGLYSLSSVVTVPSSSLGTQTYICNVNHKPSNTKVDKKVEPKSCDKTHTCPPCPAPEAAGGPSVFLFPPKPKDTLMISRTPEVTCVVVDVSHEDPEVKFNWYVDGVEVHNAKTKPREEQYGSTYRVVSVLTVLHQDWLNGKEYKCKVSNKALGAPIEKTISKAKGQPREPQVYTLPPCRDELTKNQVSLWCLVKGFYPSDIAVEWESNGQPENNYKTTPPVLDSDGSFFLYSKLTVDKSRWQQGNVFSCSVMHEALHNHYTQKSLSLSP

SEQ ID NO: 932 - protein, 698 aa, synthetic construct
QVQLVQSGAEVKKPGSSVKVSCKASGYSFTTYYIHWVRQAPGQGLEWMGWFFPGSGNIKYNEKFKGRVTITADTSTSTAYMELSSLRSEDTAVYYCAGSYYSYDVLCYWGQGTTVTVSSGGGGSGGGGSGGGGSDIQMTQSPSFLSASVGDRVTITCKASQNVGINVVWHQQKPGKAPKCLIYSSSHRYSGVPSRFSGSGSGTEFTLTISSLQPEDFATYFCQQFKSYPLTFGQGTKLEIKGGGGSQVQLQQSGAELVRPGSSVKISCKASGYAFSSYWMNWVKQRPGQGLEWIGQIWPGDGDTNYNGKFKGKATLTADESSSTAYMQLSSLASEDSAVYFCARRETTTVGRYYYAMDYWGQGTTVTVSSASTKGPSVFPLAPSSKSTSGGTAALGCLVKDYFPEPVTVSWNSGALTSGVHTFPAVLQSSGLYSLSSVVTVPSSSLGTQTYICNVNHKPSNTKVDKKVEPKSCDKTHTCPPCPAPEAAGGPSVFLFPPKPKDTLMISRTPEVTCVVVDVSHEDPEVKFNWYVDGVEVHNAKTKPREEQYGSTYRVVSVLTVLHQDWLNGKEYKCKVSNKALGAPIEKTISKAKGQPREPQVYTLPPCRDELTKNQVSLWCLVKGFYPSDIAVEWESNGQPENNYKTTPPVLDSDGSFFLYSKLTVDKSRWQQGNVFSCSVMHEALHNHYTQKSLSLSP

SEQ ID NO: 933 - protein, 698 aa, synthetic construct
DIQMTQSPSFLSASVGDRVTITCKASQNVGINVVWHQQKPGKAPKCLIYSSSHRYSGVPSRFSGSGSGTEFTLTISSLQPEDFATYFCQQFKSYPLTFGQGTKLEIKGGGGSGGGGSGGGGSQVQLVQSGAEVKKPGSSVKVSCKASGYSFTTYYIHWVRQAPGQGLEWMGWFFPGSGNIKYNEKFKGRVTITADTSTSTAYMELSSLRSEDTAVYYCAGSYYSYDVLCYWGQGTTVTVSSGGGGSQVQLQQSGAELVRPGSSVKISCKASGYAFSSYWMNWVKQRPGQGLEWIGQIWPGDGDTNYNGKFKGKATLTADESSSTAYMQLSSLASEDSAVYFCARRETTTVGRYYYAMDYWGQGTTVTVSSASTKGPSVFPLAPSSKSTSGGTAALGCLVKDYFPEPVTVSWNSGALTSGVHTFPAVLQSSGLYSLSSVVTVPSSSLGTQTYICNVNHKPSNTKVDKKVEPKSCDKTHTCPPCPAPEAAGGPSVFLFPPKPKDTLMISRTPEVTCVVVDVSHEDPEVKFNWYVDGVEVHNAKTKPREEQYGSTYRVVSVLTVLHQDWLNGKEYKCKVSNKALGAPIEKTISKAKGQPREPQVYTLPPCRDELTKNQVSLWCLVKGFYPSDIAVEWESNGQPENNYKTTPPVLDSDGSFFLYSKLTVDKSRWQQGNVFSCSVMHEALHNHYTQKSLSLSP

SEQ ID NO: 934 - protein, 698 aa, synthetic construct
QVQLVQSGAEVKKPGASVKVSCKASGYSFTTYYIHWVRQAPGQGLEWMGWFFPGSGNIKYNEKFKGRVTITADTSTSTAYMELSSLRSEDTAVYYCAGSYYSYDVLDYWGQGTLVTVSSGGGGSGGGGSGGGGSDIQMTQSPSFLSASVGDRVTITCKASQNVGINVVWHQQKPGKAPKALIYSSSHRYSGVPSRFSGSGSGTEFTLTISSLQPEDFATYFCQQFKSYPLTFGQGTKLEIKGGGGSQVQLQQSGAELVRPGSSVKISCKASGYAFSSYWMNWVKQRPGQGLEWIGQIWPGDGDTNYNGKFKGKATLTADESSSTAYMQLSSLASEDSAVYFCARRETTTVGRYYYAMDYWGQGTTVTVSSASTKGPSVFPLAPSSKSTSGGTAALGCLVKDYFPEPVTVSWNSGALTSGVHTFPAVLQSSGLYSLSSVVTVPSSSLGTQTYICNVNHKPSNTKVDKKVEPKSCDKTHTCPPCPAPEAAGGPSVFLFPPKPKDTLMISRTPEVTCVVVDVSHEDPEVKFNWYVDGVEVHNAKTKPREEQYGSTYRVVSVLTVLHQDWLNGKEYKCKVSNKALGAPIEKTISKAKGQPREPQVYTLPPCRDELTKNQVSLWCLVKGFYPSDIAVEWESNGQPENNYKTTPPVLDSDGSFFLYSKLTVDKSRWQQGNVFSCSVMHEALHNHYTQKSLSLSP

SEQ ID NO: 935 - protein, 698 aa, synthetic construct
QVQLVQSGAEVKKPGASVKVSCKASGYSFTTYYIHWVRQAPGQCLEWMGWFFPGSGNIKYNEKFKGRVTITADTSTSTAYMELSSLRSEDTAVYYCAGSYYSYDVLDYWGQGTLVTVSSGGGGSGGGGSGGGGSDIQMTQSPSFLSASVGDRVTITCKASQNVGINVVWHQQKPGKAPKALIYSSSHRYSGVPSRFSGSGSGTEFTLTISSLQPEDFATYFCQQFKSYPLTFGCGTKLEIKGGGGSQVQLQQSGAELVRPGSSVKISCKASGYAFSSYWMNWVKQRPGQGLEWIGQIWPGDGDTNYNGKFKGKATLTADESSSTAYMQLSSLASEDSAVYFCARRETTTVGRYYYAMDYWGQGTTVTVSSASTKGPSVFPLAPSSKSTSGGTAALGCLVKDYFPEPVTVSWNSGALTSGVHTFPAVLQSSGLYSLSSVVTVPSSSLGTQTYICNVNHKPSNTKVDKKVEPKSCDKTHTCPPCPAPEAAGGPSVFLFPPKPKDTLMISRTPEVTCVVVDVSHEDPEVKFNWYVDGVEVHNAKTKPREEQYGSTYRVVSVLTVLHQDWLNGKEYKCKVSNKALGAPIEKTISKAKGQPREPQVYTLPPCRDELTKNQVSLWCLVKGFYPSDIAVEWESNGQPENNYKTTPPVLDSDGSFFLYSKLTVDKSRWQQGNVFSCSVMHEALHNHYTQKSLSLSP

SEQ ID NO: 936 - protein, 449 aa, synthetic construct; identical to SEQ ID NO: 812

SEQ ID NO: 937 - protein, 695 aa, synthetic construct
DIQMTQSPSFLSASVGDRVTITCKASQNVGINVVWHQQKPGKAPKALIYSSSHRYSGVPSRFSGSGSGTEFTLTISSLQPEDFATYFCQQFKSYPLTFGQGTKLEIKGGGGSGGGGSGGGGSQVQLVQSGAEVKKPGSSVKVSCKASGYSFTTYYIHWVRQAPGQGLEWMGWFFPGSGNIKYNEKFKGRVTITADTSTSTAYMELSSLRSEDTAVYYCAGSYYSYDVLDYWGQGTTVTVSSGGGGSEVQLVESGGGLVKPGGSLKLSCAASGYTFTSYVMHWVRQAPGKGLEWIGYINPYNDGTKYNEKFQGRVTISSDKSISTAYMELSSLRSEDTAMYYCARGTYYYGTRVFDYWGQGTLVTVSSASTKGPSVFPLAPSSKSTSGGTAALGCLVKDYFPEPVTVSWNSGALTSGVHTFPAVLQSSGLYSLSSVVTVPSSSLGTQTYICNVNHKPSNTKVDKKVEPKSCDKTHTCPPCPAPEAAGGPSVFLFPPKPKDTLMISRTPEVTCVVVDVSHEDPEVKFNWYVDGVEVHNAKTKPREEQYGSTYRVVSVLTVLHQDWLNGKEYKCKVSNKALGAPIEKTISKAKGQPREPQVYTLPPCRDELTKNQVSLWCLVKGFYPSDIAVEWESNGQPENNYKTTPPVLDSDGSFFLYSKLTVDKSRWQQGNVFSCSVMHEALHNHYTQKSLSLSP

SEQ ID NO: 938 - protein, 449 aa, synthetic construct; identical to SEQ ID NO: 812

SEQ ID NO: 939 - protein, 695 aa, synthetic construct
DIQMTQSPSFLSASVGDRVTITCKASQNVGINVVWHQQKPGKAPKALIYSSSHRYSGVPSRFSGSGSGTEFTLTISSLQPEDFATYFCQQFKSYPLTFGCGTKLEIKGGGGSGGGGSGGGGSQVQLVQSGAEVKKPGSSVKVSCKASGYSFTTYYIHWVRQAPGQCLEWMGWFFPGSGNIKYNEKFKGRVTITADTSTSTAYMELSSLRSEDTAVYYCAGSYYSYDVLDYWGQGTTVTVSSGGGGSEVQLVESGGGLVKPGGSLKLSCAASGYTFTSYVMHWVRQAPGKGLEWIGYINPYNDGTKYNEKFQGRVTISSDKSISTAYMELSSLRSEDTAMYYCARGTYYYGTRVFDYWGQGTLVTVSSASTKGPSVFPLAPSSKSTSGGTAALGCLVKDYFPEPVTVSWNSGALTSGVHTFPAVLQSSGLYSLSSVVTVPSSSLGTQTYICNVNHKPSNTKVDKKVEPKSCDKTHTCPPCPAPEAAGGPSVFLFPPKPKDTLMISRTPEVTCVVVDVSHEDPEVKFNWYVDGVEVHNAKTKPREEQYGSTYRVVSVLTVLHQDWLNGKEYKCKVSNKALGAPIEKTISKAKGQPREPQVYTLPPCRDELTKNQVSLWCLVKGFYPSDIAVEWESNGQPENNYKTTPPVLDSDGSFFLYSKLTVDKSRWQQGNVFSCSVMHEALHNHYTQKSLSLSP

SEQ ID NO: 940 - protein, 709 aa, synthetic construct
EVQLVESGGGLVKPGGSLKLSCAASGYTFTSYVMHWVRQAPGKGLEWIGYINPYNDGTKYNEKFQGRVTISSDKSISTAYMELSSLRSEDTAMYYCARGTYYYGTRVFDYWGQGTLVTVSSASTKGPSVFPLAPSSKSTSGGTAALGCLVKDYFPEPVTVSWNSGALTSGVHTFPAVLQSSGLYSLSSVVTVPSSSLGTQTYICNVNHKPSNTKVDKKVEPKSCGGGGSGGGGSDIQMTQSPSFLSASVGDRVTITCKASQNVGINVVWHQQKPGKAPKALIYSSSHRYSGVPSRFSGSGSGTEFTLTISSLQPEDFATYFCQQFKSYPLTFGQGTKLEIKGGGGSGGGGSGGGGSQVQLVQSGAEVKKPGSSVKVSCKASGYSFTTYYIHWVRQAPGQGLEWMGWFFPGSGNIKYNEKFKGRVTITADTSTSTAYMELSSLRSEDTAVYYCAGSYYSYDVLDYWGQGTTVTVSSGGGGSGGGGSKTHTCPPCPAPEAAGGPSVFLFPPKPKDTLMISRTPEVTCVVVDVSHEDPEVKFNWYVDGVEVHNAKTKPREEQYGSTYRVVSVLTVLHQDWLNGKEYKCKVSNKALGAPIEKTISKAKGQPREPQVYTLPPCRDELTKNQVSLWCLVKGFYPSDIAVEWESNGQPENNYKTTPPVLDSDGSFFLYSKLTVDKSRWQQGNVFSCSVMHEALHNHYTQKSLSLSP

SEQ ID NO: 941 - protein, 709 aa, synthetic construct
EVQLVESGGGLVKPGGSLKLSCAASGYTFTSYVMHWVRQAPGKGLEWIGYINPYNDGTKYNEKFQGRVTISSDKSISTAYMELSSLRSEDTAMYYCARGTYYYGTRVFDYWGQGTLVTVSSASTKGPSVFPLAPSSKSTSGGTAALGCLVKDYFPEPVTVSWNSGALTSGVHTFPAVLQSSGLYSLSSVVTVPSSSLGTQTYICNVNHKPSNTKVDKKVEPKSCGGGGSGGGGSDIQMTQSPSFLSASVGDRVTITCKASQNVGINVVWHQQKPGKAPKALIYSSSHRYSGVPSRFSGSGSGTEFTLTISSLQPEDFATYFCQQFKSYPLTFGCGTKLEIKGGGGSGGGGSGGGGSQVQLVQSGAEVKKPGSSVKVSCKASGYSFTTYYIHWVRQAPGQCLEWMGWFFPGSGNIKYNEKFKGRVTITADTSTSTAYMELSSLRSEDTAVYYCAGSYYSYDVLDYWGQGTTVTVSSGGGGSGGGGSKTHTCPPCPAPEAAGGPSVFLFPPKPKDTLMISRTPEVTCVVVDVSHEDPEVKFNWYVDGVEVHNAKTKPREEQYGSTYRVVSVLTVLHQDWLNGKEYKCKVSNKALGAPIEKTISKAKGQPREPQVYTLPPCRDELTKNQVSLWCLVKGFYPSDIAVEWESNGQPENNYKTTPPVLDSDGSFFLYSKLTVDKSRWQQGNVFSCSVMHEALHNHYTQKSLSLSP

SEQ ID NO: 942 - protein, 452 aa, synthetic construct; identical to SEQ ID NO: 918

SEQ ID NO: 943 - protein, 452 aa, synthetic construct; identical to SEQ ID NO: 918

SEQ ID NO: 944 - protein, 712 aa, synthetic construct
QVQLQQSGAELVRPGSSVKISCKASGYAFSSYWMNWVKQRPGQGLEWIGQIWPGDGDTNYNGKFKGKATLTADESSSTAYMQLSSLASEDSAVYFCARRETTTVGRYYYAMDYWGQGTTVTVSSASTKGPSVFPLAPSSKSTSGGTAALGCLVKDYFPEPVTVSWNSGALTSGVHTFPAVLQSSGLYSLSSVVTVPSSSLGTQTYICNVNHKPSNTKVDKKVEPKSCGGGGSGGGGSDIQMTQSPSFLSASVGDRVTITCKASQNVGINVVWHQQKPGKAPKALIYSSSHRYSGVPSRFSGSGSGTEFTLTISSLQPEDFATYFCQQFKSYPLTFGQGTKLEIKGGGGSGGGGSGGGGSQVQLVQSGAEVKKPGSSVKVSCKASGYSFTTYYIHWVRQAPGQGLEWMGWFFPGSGNIKYNEKFKGRVTITADTSTSTAYMELSSLRSEDTAVYYCAGSYYSYDVLDYWGQGTTVTVSSGGGGSGGGGSKTHTCPPCPAPEAAGGPSVFLFPPKPKDTLMISRTPEVTCVVVDVSHEDPEVKFNWYVDGVEVHNAKTKPREEQYGSTYRVVSVLTVLHQDWLNGKEYKCKVSNKALGAPIEKTISKAKGQPREPQVYTLPPCRDELTKNQVSLWCLVKGFYPSDIAVEWESNGQPENNYKTTPPVLDSDGSFFLYSKLTVDKSRWQQGNVFSCSVMHEALHNHYTQKSLSLSP

SEQ ID NO: 945 - protein, 712 aa, synthetic construct
QVQLQQSGAELVRPGSSVKISCKASGYAFSSYWMNWVKQRPGQGLEWIGQIWPGDGDTNYNGKFKGKATLTADESSSTAYMQLSSLASEDSAVYFCARRETTTVGRYYYAMDYWGQGTTVTVSSASTKGPSVFPLAPSSKSTSGGTAALGCLVKDYFPEPVTVSWNSGALTSGVHTFPAVLQSSGLYSLSSVVTVPSSSLGTQTYICNVNHKPSNTKVDKKVEPKSCGGGGSGGGGSDIQMTQSPSFLSASVGDRVTITCKASQNVGINVVWHQQKPGKAPKALIYSSSHRYSGVPSRFSGSGSGTEFTLTISSLQPEDFATYFCQQFKSYPLTFGCGTKLEIKGGGGSGGGGSGGGGSQVQLVQSGAEVKKPGSSVKVSCKASGYSFTTYYIHWVRQAPGQCLEWMGWFFPGSGNIKYNEKFKGRVTITADTSTSTAYMELSSLRSEDTAVYYCAGSYYSYDVLDYWGQGTTVTVSSGGGGSGGGGSKTHTCPPCPAPEAAGGPSVFLFPPKPKDTLMISRTPEVTCVVVDVSHEDPEVKFNWYVDGVEVHNAKTKPREEQYGSTYRVVSVLTVLHQDWLNGKEYKCKVSNKALGAPIEKTISKAKGQPREPQVYTLPPCRDELTKNQVSLWCLVKGFYPSDIAVEWESNGQPENNYKTTPPVLDSDGSFFLYSKLTVDKSRWQQGNVFSCSVMHEALHNHYTQKSLSLSP

SEQ ID NO: 946 - protein, 697 aa, synthetic construct
QVQLQQPGAELVKPGTSVKLSCKASGYTFTNYWMHWMKQRPGQGLEWIGMIHPTTGTIYNEKFKTTATLTVDTSSSTAYMQLSSLTSEDSAVFFCARGATVPHYFDYWGQGTILTVSSGGGGSGGGGSGGGGSDVQITQSPSYLAASPGESITINCRASKTISKYLAWYQEKPGKTNKLLIYSGSTLQSGIPSRFSGSGSGTDFTLTISSLEPEDFAMYYCQQHYEYPWTFGGGTTLEIKGGGGSQVQLQQSGAELVRPGSSVKISCKASGYAFSSYWMNWVKQRPGQGLEWIGQIWPGDGDTNYNGKFKGKATLTADESSSTAYMQLSSLASEDSAVYFCARRETTTVGRYYYAMDYWGQGTTVTVSSASTKGPSVFPLAPSSKSTSGGTAALGCLVKDYFPEPVTVSWNSGALTSGVHTFPAVLQSSGLYSLSSVVTVPSSSLGTQTYICNVNHKPSNTKVDKKVEPKSCDKTHTCPPCPAPEAAGGPSVFLFPPKPKDTLMISRTPEVTCVVVDVSHEDPEVKFNWYVDGVEVHNAKTKPREEQYGSTYRVVSVLTVLHQDWLNGKEYKCKVSNKALGAPIEKTISKAKGQPREPQVYTLPPCRDELTKNQVSLWCLVKGFYPSDIAVEWESNGQPENNYKTTPPVLDSDGSFFLYSKLTVDKSRWQQGNVFSCSVMHEALHNHYTQKSLSLSP

SEQ ID NO: 947 - protein, 697 aa, synthetic construct
DVQITQSPSYLAASPGESITINCRASKTISKYLAWYQEKPGKTNKLLIYSGSTLQSGIPSRFSGSGSGTDFTLTISSLEPEDFAMYYCQQHYEYPWTFGGGTTLEIKGGGGSGGGGSGGGGSQVQLQQPGAELVKPGTSVKLSCKASGYTFTNYWMHWMKQRPGQGLEWIGMIHPTTGTIYNEKFKTTATLTVDTSSSTAYMQLSSLTSEDSAVFFCARGATVPHYFDYWGQGTILTVSSGGGGSQVQLQQSGAELVRPGSSVKISCKASGYAFSSYWMNWVKQRPGQGLEWIGQIWPGDGDTNYNGKFKGKATLTADESSSTAYMQLSSLASEDSAVYFCARRETTTVGRYYYAMDYWGQGTTVTVSSASTKGPSVFPLAPSSKSTSGGTAALGCLVKDYFPEPVTVSWNSGALTSGVHTFPAVLQSSGLYSLSSVVTVPSSSLGTQTYICNVNHKPSNTKVDKKVEPKSCDKTHTCPPCPAPEAAGGPSVFLFPPKPKDTLMISRTPEVTCVVVDVSHEDPEVKFNWYVDGVEVHNAKTKPREEQYGSTYRVVSVLTVLHQDWLNGKEYKCKVSNKALGAPIEKTISKAKGQPREPQVYTLPPCRDELTKNQVSLWCLVKGFYPSDIAVEWESNGQPENNYKTTPPVLDSDGSFFLYSKLTVDKSRWQQGNVFSCSVMHEALHNHYTQKSLSLSP

SEQ ID NO: 948 - protein, 697 aa, synthetic construct
QVQLVQSGAEVKKPGASVKVSCKASGYTFTNYWMHWVRQAPGQGLEWIGMIHPTTGTIYNEKFKTRATLTVDTSTSTAYMELSSLTSEDTAVYFCARGATVPHYFDYWGQGTLVTVSSGGGGSGGGGSGGGGSDVQITQSPSTLSASVGDRVTITCRASKTISKYLAWYQQKPGKAPKLLIYSGSTLQSGVPSRFSGSGSGTDFTLTISSLQPEDFATYYCQQHYEYPWTFGQGTKVEIKGGGGSQVQLQQSGAELVRPGSSVKISCKASGYAFSSYWMNWVKQRPGQGLEWIGQIWPGDGDTNYNGKFKGKATLTADESSSTAYMQLSSLASEDSAVYFCARRETTTVGRYYYAMDYWGQGTTVTVSSASTKGPSVFPLAPSSKSTSGGTAALGCLVKDYFPEPVTVSWNSGALTSGVHTFPAVLQSSGLYSLSSVVTVPSSSLGTQTYICNVNHKPSNTKVDKKVEPKSCDKTHTCPPCPAPEAAGGPSVFLFPPKPKDTLMISRTPEVTCVVVDVSHEDPEVKFNWYVDGVEVHNAKTKPREEQYGSTYRVVSVLTVLHQDWLNGKEYKCKVSNKALGAPIEKTISKAKGQPREPQVYTLPPCRDELTKNQVSLWCLVKGFYPSDIAVEWESNGQPENNYKTTPPVLDSDGSFFLYSKLTVDKSRWQQGNVFSCSVMHEALHNHYTQKSLSLSP

SEQ ID NO: 949 - protein, 697 aa, synthetic construct
DVQITQSPSTLSASVGDRVTITCRASKTISKYLAWYQQKPGKAPKLLIYSGSTLQSGVPSRFSGSGSGTDFTLTISSLQPEDFATYYCQQHYEYPWTFGQGTKVEIKGGGGSGGGGSGGGGSQVQLVQSGAEVKKPGASVKVSCKASGYTFTNYWMHWVRQAPGQGLEWIGMIHPTTGTIYNEKFKTRATLTVDTSTSTAYMELSSLTSEDTAVYFCARGATVPHYFDYWGQGTLVTVSSGGGGSQVQLQQSGAELVRPGSSVKISCKASGYAFSSYWMNWVKQRPGQGLEWIGQIWPGDGDTNYNGKFKGKATLTADESSSTAYMQLSSLASEDSAVYFCARRETTTVGRYYYAMDYWGQGTTVTVSSASTKGPSVFPLAPSSKSTSGGTAALGCLVKDYFPEPVTVSWNSGALTSGVHTFPAVLQSSGLYSLSSVVTVPSSSLGTQTYICNVNHKPSNTKVDKKVEPKSCDKTHTCPPCPAPEAAGGPSVFLFPPKPKDTLMISRTPEVTCVVVDVSHEDPEVKFNWYVDGVEVHNAKTKPREEQYGSTYRVVSVLTVLHQDWLNGKEYKCKVSNKALGAPIEKTISKAKGQPREPQVYTLPPCRDELTKNQVSLWCLVKGFYPSDIAVEWESNGQPENNYKTTPPVLDSDGSFFLYSKLTVDKSRWQQGNVFSCSVMHEALHNHYTQKSLSLSP

SEQ ID NO: 950 - protein, 697 aa, synthetic construct
QVQLVQSGAEVKKPGASVKVSCKASGYTFTNYWMHWVRQAPGQGLEWMGMIHPTTGTIYNEKFKTRVTLTRDTSTSTAYMELSSLTSEDTAVYFCARGATVPHYFDYWGQGTLVTVSSGGGGSGGGGSGGGGSDVQITQSPSTLSASVGDRVTITCRASKTISKYLAWYQQKPGKAPKLLIYSGSTLQSGVPSRFSGSGSGTDFTLTISSLQPEDFATYYCQQHYEYPWTFGQGTKVEIKGGGGSQVQLQQSGAELVRPGSSVKISCKASGYAFSSYWMNWVKQRPGQGLEWIGQIWPGDGDTNYNGKFKGKATLTADESSSTAYMQLSSLASEDSAVYFCARRETTTVGRYYYAMDYWGQGTTVTVSSASTKGPSVFPLAPSSKSTSGGTAALGCLVKDYFPEPVTVSWNSGALTSGVHTFPAVLQSSGLYSLSSVVTVPSSSLGTQTYICNVNHKPSNTKVDKKVEPKSCDKTHTCPPCPAPEAAGGPSVFLFPPKPKDTLMISRTPEVTCVVVDVSHEDPEVKFNWYVDGVEVHNAKTKPREEQYGSTYRVVSVLTVLHQDWLNGKEYKCKVSNKALGAPIEKTISKAKGQPREPQVYTLPPCRDELTKNQVSLWCLVKGFYPSDIAVEWESNGQPENNYKTTPPVLDSDGSFFLYSKLTVDKSRWQQGNVFSCSVMHEALHNHYTQKSLSLSP

SEQ ID NO: 951 - protein, 697 aa, synthetic construct
DVQITQSPSTLSASVGDRVTITCRASKTISKYLAWYQQKPGKAPKLLIYSGSTLQSGVPSRFSGSGSGTDFTLTISSLQPEDFATYYCQQHYEYPWTFGQGTKVEIKGGGGSGGGGSGGGGSQVQLVQSGAEVKKPGASVKVSCKASGYTFTNYWMHWVRQAPGQGLEWMGMIHPTTGTIYNEKFKTRVTLTRDTSTSTAYMELSSLTSEDTAVYFCARGATVPHYFDYWGQGTLVTVSSGGGGSQVQLQQSGAELVRPGSSVKISCKASGYAFSSYWMNWVKQRPGQGLEWIGQIWPGDGDTNYNGKFKGKATLTADESSSTAYMQLSSLASEDSAVYFCARRETTTVGRYYYAMDYWGQGTTVTVSSASTKGPSVFPLAPSSKSTSGGTAALGCLVKDYFPEPVTVSWNSGALTSGVHTFPAVLQSSGLYSLSSVVTVPSSSLGTQTYICNVNHKPSNTKVDKKVEPKSCDKTHTCPPCPAPEAAGGPSVFLFPPKPKDTLMISRTPEVTCVVVDVSHEDPEVKFNWYVDGVEVHNAKTKPREEQYGSTYRVVSVLTVLHQDWLNGKEYKCKVSNKALGAPIEKTISKAKGQPREPQVYTLPPCRDELTKNQVSLWCLVKGFYPSDIAVEWESNGQPENNYKTTPPVLDSDGSFFLYSKLTVDKSRWQQGNVFSCSVMHEALHNHYTQKSLSLSP

SEQ ID NO: 952 - protein, 696 aa, synthetic construct
EVQLVASGGDLVKPGGSLKLSCAASGFTFSSYGMSWVRQTPDKRLEWVATITSSGGSYTYYPDNMKGRFTISRDNAKNTLYLQMSSLKSEDTAMYYCARPQVGPGDYWGQGTSLTVSSGGGGSGGGGSGGGGSQIVLTQSPAIISASLGEGITLTCSASSSVSYMHWYQQKSGTSPKLLIYTTSNLASGVPSRFSGSGSGTFYSLTISSVEAEDAADYYCHQWSSYMYTFGGGTKLEIKGGGGSQVQLQQSGAELVRPGSSVKISCKASGYAFSSYWMNWVKQRPGQGLEWIGQIWPGDGDTNYNGKFKGKATLTADESSSTAYMQLSSLASEDSAVYFCARRETTTVGRYYYAMDYWGQGTTVTVSSASTKGPSVFPLAPSSKSTSGGTAALGCLVKDYFPEPVTVSWNSGALTSGVHTFPAVLQSSGLYSLSSVVTVPSSSLGTQTYICNVNHKPSNTKVDKKVEPKSCDKTHTCPPCPAPEAAGGPSVFLFPPKPKDTLMISRTPEVTCVVVDVSHEDPEVKFNWYVDGVEVHNAKTKPREEQYGSTYRVVSVLTVLHQDWLNGKEYKCKVSNKALGAPIEKTISKAKGQPREPQVYTLPPCRDELTKNQVSLWCLVKGFYPSDIAVEWESNGQPENNYKTTPPVLDSDGSFFLYSKLTVDKSRWQQGNVFSCSVMHEALHNHYTQKSLSLSP

SEQ ID NO: 953 - protein, 696 aa, synthetic construct
QIVLTQSPAIISASLGEGITLTCSASSSVSYMHWYQQKSGTSPKLLIYTTSNLASGVPSRFSGSGSGTFYSLTISSVEAEDAADYYCHQWSSYMYTFGGGTKLEIKGGGGSGGGGSGGGGSEVQLVASGGDLVKPGGSLKLSCAASGFTFSSYGMSWVRQTPDKRLEWVATITSSGGSYTYYPDNMKGRFTISRDNAKNTLYLQMSSLKSEDTAMYYCARPQVGPGDYWGQGTSLTVSSGGGGSQVQLQQSGAELVRPGSSVKISCKASGYAFSSYWMNWVKQRPGQGLEWIGQIWPGDGDTNYNGKFKGKATLTADESSSTAYMQLSSLASEDSAVYFCARRETTTVGRYYYAMDYWGQGTTVTVSSASTKGPSVFPLAPSSKSTSGGTAALGCLVKDYFPEPVTVSWNSGALTSGVHTFPAVLQSSGLYSLSSVVTVPSSSLGTQTYICNVNHKPSNTKVDKKVEPKSCDKTHTCPPCPAPEAAGGPSVFLFPPKPKDTLMISRTPEVTCVVVDVSHEDPEVKFNWYVDGVEVHNAKTKPREEQYGSTYRVVSVLTVLHQDWLNGKEYKCKVSNKALGAPIEKTISKAKGQPREPQVYTLPPCRDELTKNQVSLWCLVKGFYPSDIAVEWESNGQPENNYKTTPPVLDSDGSFFLYSKLTVDKSRWQQGNVFSCSVMHEALHNHYTQKSLSLSP

SEQ ID NO: 954 - protein, 696 aa, synthetic construct
EVQLVESGGGLVKPGGSLRLSCAASGFTFSSYGMSWVRQAPGKGLEWVATITSSGGSYTYYPDNMKGRFTISRDNAKNTLYLQMSSLRAEDTAVYYCARPQVGPGDYWGQGTLVTVSSGGGGSGGGGSGGGGSEIVLTQSPATLSLSPGERATLSCSASSSVSYMHWYQQKPGKAPKLLIYTTSNLASGVPSRFSGSGSGTDYTLTISSLQAEDFATYYCHQWSSYMYTFGQGTKLEIKGGGGSQVQLQQSGAELVRPGSSVKISCKASGYAFSSYWMNWVKQRPGQGLEWIGQIWPGDGDTNYNGKFKGKATLTADESSSTAYMQLSSLASEDSAVYFCARRETTTVGRYYYAMDYWGQGTTVTVSSASTKGPSVFPLAPSSKSTSGGTAALGCLVKDYFPEPVTVSWNSGALTSGVHTFPAVLQSSGLYSLSSVVTVPSSSLGTQTYICNVNHKPSNTKVDKKVEPKSCDKTHTCPPCPAPEAAGGPSVFLFPPKPKDTLMISRTPEVTCVVVDVSHEDPEVKFNWYVDGVEVHNAKTKPREEQYGSTYRVVSVLTVLHQDWLNGKEYKCKVSNKALGAPIEKTISKAKGQPREPQVYTLPPCRDELTKNQVSLWCLVKGFYPSDIAVEWESNGQPENNYKTTPPVLDSDGSFFLYSKLTVDKSRWQQGNVFSCSVMHEALHNHYTQKSLSLSP

SEQ ID NO: 955 - protein, 696 aa, synthetic construct
EIVLTQSPATLSLSPGERATLSCSASSSVSYMHWYQQKPGKAPKLLIYTTSNLASGVPSRFSGSGSGTDYTLTISSLQAEDFATYYCHQWSSYMYTFGQGTKLEIKGGGGSGGGGSGGGGSEVQLVESGGGLVKPGGSLRLSCAASGFTFSSYGMSWVRQAPGKGLEWVATITSSGGSYTYYPDNMKGRFTISRDNAKNTLYLQMSSLRAEDTAVYYCARPQVGPGDYWGQGTLVTVSSGGGGSQVQLQQSGAELVRPGSSVKISCKASGYAFSSYWMNWVKQRPGQGLEWIGQIWPGDGDTNYNGKFKGKATLTADESSSTAYMQLSSLASEDSAVYFCARRETTTVGRYYYAMDYWGQGTTVTVSSASTKGPSVFPLAPSSKSTSGGTAALGCLVKDYFPEPVTVSWNSGALTSGVHTFPAVLQSSGLYSLSSVVTVPSSSLGTQTYICNVNHKPSNTKVDKKVEPKSCDKTHTCPPCPAPEAAGGPSVFLFPPKPKDTLMISRTPEVTCVVVDVSHEDPEVKFNWYVDGVEVHNAKTKPREEQYGSTYRVVSVLTVLHQDWLNGKEYKCKVSNKALGAPIEKTISKAKGQPREPQVYTLPPCRDELTKNQVSLWCLVKGFYPSDIAVEWESNGQPENNYKTTPPVLDSDGSFFLYSKLTVDKSRWQQGNVFSCSVMHEALHNHYTQKSLSLSP

SEQ ID NO: 956 - protein, 696 aa, synthetic construct
EVQLVESGGGLVKPGGSLRLSCAASGFTFSSYGMSWVRQAPGKGLEWVSTITSSGGSYTYYPDNMKGRFTISRDNAKNTLYLQMSSLRAEDTAVYYCARPQVGPGDYWGQGTLVTVSSGGGGSGGGGSGGGGSEIVLTQSPATLSLSPGERATLSCSASSSVSYMHWYQQKPGKAPKLLIYTTSNLASGVPSRFSGSGSGTDYTLTISSLQAEDFATYYCHQWSSYMYTFGQGTKLEIKGGGGSQVQLQQSGAELVRPGSSVKISCKASGYAFSSYWMNWVKQRPGQGLEWIGQIWPGDGDTNYNGKFKGKATLTADESSSTAYMQLSSLASEDSAVYFCARRETTTVGRYYYAMDYWGQGTTVTVSSASTKGPSVFPLAPSSKSTSGGTAALGCLVKDYFPEPVTVSWNSGALTSGVHTFPAVLQSSGLYSLSSVVTVPSSSLGTQTYICNVNHKPSNTKVDKKVEPKSCDKTHTCPPCPAPEAAGGPSVFLFPPKPKDTLMISRTPEVTCVVVDVSHEDPEVKFNWYVDGVEVHNAKTKPREEQYGSTYRVVSVLTVLHQDWLNGKEYKCKVSNKALGAPIEKTISKAKGQPREPQVYTLPPCRDELTKNQVSLWCLVKGFYPSDIAVEWESNGQPENNYKTTPPVLDSDGSFFLYSKLTVDKSRWQQGNVFSCSVMHEALHNHYTQKSLSLSP

SEQ ID NO: 957 - protein, 696 aa, synthetic construct
EIVLTQSPATLSLSPGERATLSCSASSSVSYMHWYQQKPGKAPKLLIYTTSNLASGVPSRFSGSGSGTDYTLTISSLQAEDFATYYCHQWSSYMYTFGQGTKLEIKGGGGSGGGGSGGGGSEVQLVESGGGLVKPGGSLRLSCAASGFTFSSYGMSWVRQAPGKGLEWVSTITSSGGSYTYYPDNMKGRFTISRDNAKNTLYLQMSSLRAEDTAVYYCARPQVGPGDYWGQGTLVTVSSGGGGSQVQLQQSGAELVRPGSSVKISCKASGYAFSSYWMNWVKQRPGQGLEWIGQIWPGDGDTNYNGKFKGKATLTADESSSTAYMQLSSLASEDSAVYFCARRETTTVGRYYYAMDYWGQGTTVTVSSASTKGPSVFPLAPSSKSTSGGTAALGCLVKDYFPEPVTVSWNSGALTSGVHTFPAVLQSSGLYSLSSVVTVPSSSLGTQTYICNVNHKPSNTKVDKKVEPKSCDKTHTCPPCPAPEAAGGPSVFLFPPKPKDTLMISRTPEVTCVVVDVSHEDPEVKFNWYVDGVEVHNAKTKPREEQYGSTYRVVSVLTVLHQDWLNGKEYKCKVSNKALGAPIEKTISKAKGQPREPQVYTLPPCRDELTKNQVSLWCLVKGFYPSDIAVEWESNGQPENNYKTTPPVLDSDGSFFLYSKLTVDKSRWQQGNVFSCSVMHEALHNHYTQKSLSLSP

SEQ ID NO: 958 - protein, 703 aa, synthetic construct
EVKLLQSGGGLVQPGGSLKLSCAASGIDFSRYWMSWIRRAPGKGLEWIGEINPDSSTINYAPSVKDKFIISRDNAKNTLYLQMSRVRSEDTALYYCARSYYGRGMDYWGQGTSVTVSSGGGGSGGGGSGGGGSDIVMSQSPSSLAVSVGEKVTMSCKSSQSLLYSANQKNYLAWYQQKPGQSPKLLIYGASTRESGVPDRFTGSGSGTDFTLTISSVKAEDLAIYYCQQYYSYPRTFGGGTKLEIKGGGGSQVQLQQSGAELVRPGSSVKISCKASGYAFSSYWMNWVKQRPGQGLEWIGQIWPGDGDTNYNGKFKGKATLTADESSSTAYMQLSSLASEDSAVYFCARRETTTVGRYYYAMDYWGQGTTVTVSSASTKGPSVFPLAPSSKSTSGGTAALGCLVKDYFPEPVTVSWNSGALTSGVHTFPAVLQSSGLYSLSSVVTVPSSSLGTQTYICNVNHKPSNTKVDKKVEPKSCDKTHTCPPCPAPEAAGGPSVFLFPPKPKDTLMISRTPEVTCVVVDVSHEDPEVKFNWYVDGVEVHNAKTKPREEQYGSTYRVVSVLTVLHQDWLNGKEYKCKVSNKALGAPIEKTISKAKGQPREPQVYTLPPCRDELTKNQVSLWCLVKGFYPSDIAVEWESNGQPENNYKTTPPVLDSDGSFFLYSKLTVDKSRWQQGNVFSCSVMHEALHNHYTQKSLSLSP

SEQ ID NO: 959 - protein, 703 aa, synthetic construct
DIVMSQSPSSLAVSVGEKVTMSCKSSQSLLYSANQKNYLAWYQQKPGQSPKLLIYGASTRESGVPDRFTGSGSGTDFTLTISSVKAEDLAIYYCQQYYSYPRTFGGGTKLEIKGGGGSGGGGSGGGGSEVKLLQSGGGLVQPGGSLKLSCAASGIDFSRYWMSWIRRAPGKGLEWIGEINPDSSTINYAPSVKDKFIISRDNAKNTLYLQMSRVRSEDTALYYCARSYYGRGMDYWGQGTSVTVSSGGGGSQVQLQQSGAELVRPGSSVKISCKASGYAFSSYWMNWVKQRPGQGLEWIGQIWPGDGDTNYNGKFKGKATLTADESSSTAYMQLSSLASEDSAVYFCARRETTTVGRYYYAMDYWGQGTTVTVSSASTKGPSVFPLAPSSKSTSGGTAALGCLVKDYFPEPVTVSWNSGALTSGVHTFPAVLQSSGLYSLSSVVTVPSSSLGTQTYICNVNHKPSNTKVDKKVEPKSCDKTHTCPPCPAPEAAGGPSVFLFPPKPKDTLMISRTPEVTCVVVDVSHEDPEVKFNWYVDGVEVHNAKTKPREEQYGSTYRVVSVLTVLHQDWLNGKEYKCKVSNKALGAPIEKTISKAKGQPREPQVYTLPPCRDELTKNQVSLWCLVKGFYPSDIAVEWESNGQPENNYKTTPPVLDSDGSFFLYSKLTVDKSRWQQGNVFSCSVMHEALHNHYTQKSLSLSP

SEQ ID NO: 960 - protein, 703 aa, synthetic construct
EVQLLESGGGLVQPGGSLRLSCAASGIDFSRYWMSWVRQAPGKGLEWIGEINPDSSTINYAPSVKDRFTISRDNAKNSLYLQMNSLRAEDTAVYYCARSYYGRGMDYWGQGTLVTVSSGGGGSGGGGSGGGGSDIVMTQSPDSLAVSLGERATINCKSSQSLLYSANQKNYLAWYQQKPGQPPKLLIYGASTRESGVPDRFSGSGSGTDFTLTISSLQAEDVAVYYCQQYYSYPRTFGQGTKVEIKGGGGSQVQLQQSGAELVRPGSSVKISCKASGYAFSSYWMNWVKQRPGQGLEWIGQIWPGDGDTNYNGKFKGKATLTADESSSTAYMQLSSLASEDSAVYFCARRETTTVGRYYYAMDYWGQGTTVTVSSASTKGPSVFPLAPSSKSTSGGTAALGCLVKDYFPEPVTVSWNSGALTSGVHTFPAVLQSSGLYSLSSVVTVPSSSLGTQTYICNVNHKPSNTKVDKKVEPKSCDKTHTCPPCPAPEAAGGPSVFLFPPKPKDTLMISRTPEVTCVVVDVSHEDPEVKFNWYVDGVEVHNAKTKPREEQYGSTYRVVSVLTVLHQDWLNGKEYKCKVSNKALGAPIEKTISKAKGQPREPQVYTLPPCRDELTKNQVSLWCLVKGFYPSDIAVEWESNGQPENNYKTTPPVLDSDGSFFLYSKLTVDKSRWQQGNVFSCSVMHEALHNHYTQKSLSLSP

SEQ ID NO: 961 - protein, 703 aa, synthetic construct
DIVMTQSPDSLAVSLGERATINCKSSQSLLYSANQKNYLAWYQQKPGQPPKLLIYGASTRESGVPDRFSGSGSGTDFTLTISSLQAEDVAVYYCQQYYSYPRTFGQGTKVEIKGGGGSGGGGSGGGGSEVQLLESGGGLVQPGGSLRLSCAASGIDFSRYWMSWVRQAPGKGLEWIGEINPDSSTINYAPSVKDRFTISRDNAKNSLYLQMNSLRAEDTAVYYCARSYYGRGMDYWGQGTLVTVSSGGGGSQVQLQQSGAELVRPGSSVKISCKASGYAFSSYWMNWVKQRPGQGLEWIGQIWPGDGDTNYNGKFKGKATLTADESSSTAYMQLSSLASEDSAVYFCARRETTTVGRYYYAMDYWGQGTTVTVSSASTKGPSVFPLAPSSKSTSGGTAALGCLVKDYFPEPVTVSWNSGALTSGVHTFPAVLQSSGLYSLSSVVTVPSSSLGTQTYICNVNHKPSNTKVDKKVEPKSCDKTHTCPPCPAPEAAGGPSVFLFPPKPKDTLMISRTPEVTCVVVDVSHEDPEVKFNWYVDGVEVHNAKTKPREEQYGSTYRVVSVLTVLHQDWLNGKEYKCKVSNKALGAPIEKTISKAKGQPREPQVYTLPPCRDELTKNQVSLWCLVKGFYPSDIAVEWESNGQPENNYKTTPPVLDSDGSFFLYSKLTVDKSRWQQGNVFSCSVMHEALHNHYTQKSLSLSP

SEQ ID NO: 962 - protein, 703 aa, synthetic construct
EVQLLESGGGLVQPGGSLRLSCAASGFTFSRYWMSWVRQAPGKGLEWVSEINPDSSTINYAPSVKDRFTISRDNAKNSLYLQMNSLRAEDTAVYYCARSYYGRGMDYWGQGTLVTVSSGGGGSGGGGSGGGGSDIVMTQSPDSLAVSLGERATINCKSSQSLLYSANQKNYLAWYQQKPGQPPKLLIYGASTRESGVPDRFSGSGSGTDFTLTISSLQAEDVAVYYCQQYYSYPRTFGQGTKVEIKGGGGSQVQLQQSGAELVRPGSSVKISCKASGYAFSSYWMNWVKQRPGQGLEWIGQIWPGDGDTNYNGKFKGKATLTADESSSTAYMQLSSLASEDSAVYFCARRETTTVGRYYYAMDYWGQGTTVTVSSASTKGPSVFPLAPSSKSTSGGTAALGCLVKDYFPEPVTVSWNSGALTSGVHTFPAVLQSSGLYSLSSVVTVPSSSLGTQTYICNVNHKPSNTKVDKKVEPKSCDKTHTCPPCPAPEAAGGPSVFLFPPKPKDTLMISRTPEVTCVVVDVSHEDPEVKFNWYVDGVEVHNAKTKPREEQYGSTYRVVSVLTVLHQDWLNGKEYKCKVSNKALGAPIEKTISKAKGQPREPQVYTLPPCRDELTKNQVSLWCLVKGFYPSDIAVEWESNGQPENNYKTTPPVLDSDGSFFLYSKLTVDKSRWQQGNVFSCSVMHEALHNHYTQKSLSLSP

SEQ ID NO: 963 - protein, 703 aa, synthetic construct
DIVMTQSPDSLAVSLGERATINCKSSQSLLYSANQKNYLAWYQQKPGQPPKLLIYGASTRESGVPDRFSGSGSGTDFTLTISSLQAEDVAVYYCQQYYSYPRTFGQGTKVEIKGGGGSGGGGSGGGGSEVQLLESGGGLVQPGGSLRLSCAASGFTFSRYWMSWVRQAPGKGLEWVSEINPDSSTINYAPSVKDRFTISRDNAKNSLYLQMNSLRAEDTAVYYCARSYYGRGMDYWGQGTLVTVSSGGGGSQVQLQQSGAELVRPGSSVKISCKASGYAFSSYWMNWVKQRPGQGLEWIGQIWPGDGDTNYNGKFKGKATLTADESSSTAYMQLSSLASEDSAVYFCARRETTTVGRYYYAMDYWGQGTTVTVSSASTKGPSVFPLAPSSKSTSGGTAALGCLVKDYFPEPVTVSWNSGALTSGVHTFPAVLQSSGLYSLSSVVTVPSSSLGTQTYICNVNHKPSNTKVDKKVEPKSCDKTHTCPPCPAPEAAGGPSVFLFPPKPKDTLMISRTPEVTCVVVDVSHEDPEVKFNWYVDGVEVHNAKTKPREEQYGSTYRVVSVLTVLHQDWLNGKEYKCKVSNKALGAPIEKTISKAKGQPREPQVYTLPPCRDELTKNQVSLWCLVKGFYPSDIAVEWESNGQPENNYKTTPPVLDSDGSFFLYSKLTVDKSRWQQGNVFSCSVMHEALHNHYTQKSLSLSP

SEQ ID NO: 964 - protein, 473 aa, synthetic construct; identical to SEQ ID NO: 501

SEQ ID NO: 965 - protein, 219 aa, synthetic construct; identical to SEQ ID NO: 394

SEQ ID NO: 966 - protein, 219 aa, synthetic construct; identical to SEQ ID NO: 394

SEQ ID NO: 967 - protein, 449 aa, synthetic construct; identical to SEQ ID NO: 812

SEQ ID NO: 968 - protein, 695 aa, synthetic construct; identical to SEQ ID NO: 939

SEQ ID NO: 969 - protein, 448 aa, synthetic construct
QVQLVQPGAEVVKPGASVKLSCKTSGYTFTSNWMHWVKQAPGQGLEWIGEIDPSDSYTNYNQNFQGKAKLTVDKSTSTAYMEVSSLRSDDTAVYYCARGSNPYYYAMDYWGQGTSVTVSSASTKGPSVFPLAPSSKSTSGGTAALGCLVKDYFPEPVTVSWNSGALTSGVHTFPAVLQSSGLYSLSSVVTVPSSSLGTQTYICNVNHKPSNTKVDKKVEPKSCDKTHTCPPCPAPEAAGGPSVFLFPPKPKDTLMISRTPEVTCVVVDVSHEDPEVKFNWYVDGVEVHNAKTKPREEQYGSTYRVVSVLTVLHQDWLNGKEYKCKVSNKALGAPIEKTISKAKGQPREPQVYTLPPCRDELTKNQVSLWCLVKGFYPSDIAVEWESNGQPENNYKTTPPVLDSDGSFFLYSKLTVDKSRWQQGNVFSCSVMHEALHNHYTQKSLSLSP

SEQ ID NO: 970 - protein, 694 aa, synthetic construct
QVQLVQSGAEVKKPGSSVKVSCKASGYSFTTYYIHWVRQAPGQCLEWMGWFFPGSGNIKYNEKFKGRVTITADTSTSTAYMELSSLRSEDTAVYYCAGSYYSYDVLDYWGQGTTVTVSSGGGGSGGGGSGGGGSDIQMTQSPSFLSASVGDRVTITCKASQNVGINVVWHQQKPGKAPKALIYSSSHRYSGVPSRFSGSGSGTEFTLTISSLQPEDFATYFCQQFKSYPLTFGCGTKLEIKGGGGSQVQLVQPGAEVVKPGASVKLSCKTSGYTFTSNWMHWVKQAPGQGLEWIGEIDPSDSYTNYNQNFQGKAKLTVDKSTSTAYMEVSSLRSDDTAVYYCARGSNPYYYAMDYWGQGTSVTVSSASTKGPSVFPLAPSSKSTSGGTAALGCLVKDYFPEPVTVSWNSGALTSGVHTFPAVLQSSGLYSLSSVVTVPSSSLGTQTYICNVNHKPSNTKVDKKVEPKSCDKTHTCPPCPAPEAAGGPSVFLFPPKPKDTLMISRTPEVTCVVVDVSHEDPEVKFNWYVDGVEVHNAKTKPREEQYGSTYRVVSVLTVLHQDWLNGKEYKCKVSNKALGAPIEKTISKAKGQPREPQVYTLPPCRDELTKNQVSLWCLVKGFYPSDIAVEWESNGQPENNYKTTPPVLDSDGSFFLYSKLTVDKSRWQQGNVFSCSVMHEALHNHYTQKSLSLSP

SEQ ID NO: 971 - protein, 448 aa, synthetic construct
QVQLQESGPGLVKPSQTLSLTCTVSGGSISTSGMGVGWIRQHPGKGLEWIGHIWWDDDKRYNPALKSRVTISVDTSKNQFSLKLSSVTAADTAVYYCARMELWSYYFDYWGQGTLVTVSSASTKGPSVFPLAPSSKSTSGGTAALGCLVKDYFPEPVTVSWNSGALTSGVHTFPAVLQSSGLYSLSSVVTVPSSSLGTQTYICNVNHKPSNTKVDKKVEPKSCDKTHTCPPCPAPEAAGGPSVFLFPPKPKDTLMISRTPEVTCVVVDVSHEDPEVKFNWYVDGVEVHNAKTKPREEQYGSTYRVVSVLTVLHQDWLNGKEYKCKVSNKALGAPIEKTISKAKGQPREPQVYTLPPCRDELTKNQVSLWCLVKGFYPSDIAVEWESNGQPENNYKTTPPVLDSDGSFFLYSKLTVDKSRWQQGNVFSCSVMHEALHNHYTQKSLSLSP

SEQ ID NO: 972 - protein, 694 aa, synthetic construct
QVQLVQSGAEVKKPGSSVKVSCKASGYSFTTYYIHWVRQAPGQCLEWMGWFFPGSGNIKYNEKFKGRVTITADTSTSTAYMELSSLRSEDTAVYYCAGSYYSYDVLDYWGQGTTVTVSSGGGGSGGGGSGGGGSDIQMTQSPSFLSASVGDRVTITCKASQNVGINVVWHQQKPGKAPKALIYSSSHRYSGVPSRFSGSGSGTEFTLTISSLQPEDFATYFCQQFKSYPLTFGCGTKLEIKGGGGSQVQLQESGPGLVKPSQTLSLTCTVSGGSISTSGMGVGWIRQHPGKGLEWIGHIWWDDDKRYNPALKSRVTISVDTSKNQFSLKLSSVTAADTAVYYCARMELWSYYFDYWGQGTLVTVSSASTKGPSVFPLAPSSKSTSGGTAALGCLVKDYFPEPVTVSWNSGALTSGVHTFPAVLQSSGLYSLSSVVTVPSSSLGTQTYICNVNHKPSNTKVDKKVEPKSCDKTHTCPPCPAPEAAGGPSVFLFPPKPKDTLMISRTPEVTCVVVDVSHEDPEVKFNWYVDGVEVHNAKTKPREEQYGSTYRVVSVLTVLHQDWLNGKEYKCKVSNKALGAPIEKTISKAKGQPREPQVYTLPPCRDELTKNQVSLWCLVKGFYPSDIAVEWESNGQPENNYKTTPPVLDSDGSFFLYSKLTVDKSRWQQGNVFSCSVMHEALHNHYTQKSLSLSP

SEQ ID NO: 973 - protein, 449 aa, synthetic construct
EVQLVESGGGLVQPGGSLRLSCAASGFTFSSSWMNWVRQAPGKGLEWVGRIYPGDGDTNYNVKFKGRFTISRDDSKNSLYLQMNSLKTEDTAVYYCARSGFITTVRDFDYWGQGTLVTVSSASTKGPSVFPLAPSSKSTSGGTAALGCLVKDYFPEPVTVSWNSGALTSGVHTFPAVLQSSGLYSLSSVVTVPSSSLGTQTYICNVNHKPSNTKVDKKVEPKSCDKTHTCPPCPAPEAAGGPSVFLFPPKPKDTLMISRTPEVTCVVVDVSHEDPEVKFNWYVDGVEVHNAKTKPREEQYGSTYRVVSVLTVLHQDWLNGKEYKCKVSNKALGAPIEKTISKAKGQPREPQVYTLPPCRDELTKNQVSLWCLVKGFYPSDIAVEWESNGQPENNYKTTPPVLDSDGSFFLYSKLTVDKSRWQQGNVFSCSVMHEALHNHYTQKSLSLSP

SEQ ID NO: 974 - protein, 695 aa, synthetic construct
QVQLVQSGAEVKKPGSSVKVSCKASGYSFTTYYIHWVRQAPGQCLEWMGWFFPGSGNIKYNEKFKGRVTITADTSTSTAYMELSSLRSEDTAVYYCAGSYYSYDVLDYWGQGTTVTVSSGGGGSGGGGSGGGGSDIQMTQSPSFLSASVGDRVTITCKASQNVGINVVWHQQKPGKAPKALIYSSSHRYSGVPSRFSGSGSGTEFTLTISSLQPEDFATYFCQQFKSYPLTFGCGTKLEIKGGGGSEVQLVESGGGLVQPGGSLRLSCAASGFTFSSSWMNWVRQAPGKGLEWVGRIYPGDGDTNYNVKFKGRFTISRDDSKNSLYLQMNSLKTEDTAVYYCARSGFITTVRDFDYWGQGTLVTVSSASTKGPSVFPLAPSSKSTSGGTAALGCLVKDYFPEPVTVSWNSGALTSGVHTFPAVLQSSGLYSLSSVVTVPSSSLGTQTYICNVNHKPSNTKVDKKVEPKSCDKTHTCPPCPAPEAAGGPSVFLFPPKPKDTLMISRTPEVTCVVVDVSHEDPEVKFNWYVDGVEVHNAKTKPREEQYGSTYRVVSVLTVLHQDWLNGKEYKCKVSNKALGAPIEKTISKAKGQPREPQVYTLPPCRDELTKNQVSLWCLVKGFYPSDIAVEWESNGQPENNYKTTPPVLDSDGSFFLYSKLTVDKSRWQQGNVFSCSVMHEALHNHYTQKSLSLSP

SEQ ID NO: 975 - protein, 449 aa, synthetic construct; identical to SEQ ID NO: 812

SEQ ID NO: 976 - protein, 449 aa, synthetic construct; identical to SEQ ID NO: 812

SEQ ID NO: 977 - protein, 695 aa, synthetic construct; identical to SEQ ID NO: 915

SEQ ID NO: 978 - protein, 448 aa, synthetic construct; identical to SEQ ID NO: 971

SEQ ID NO: 979 - protein, 702 aa, synthetic construct
EVQLVESGGGLVQPGGSLKLSCAASGFTFNKYAMNWVRQAPGKGLEWVARIRSKYNNYATYYADSVKDRFTISRDDSKNTAYLQMNNLKTEDTAVYYCVRHGNFGNSYISYWAYWGQGTLVTVSSGGGGSGGGGSGGGGSQTVVTQEPSLTVSPGGTVTLTCGSSTGAVTSGNYPNWVQQKPGQAPRGLIGGTKFLAPGTPARFSGSLLGGKAALTLSGVQPEDEAEYYCVLWYSNRWVFGGGTKLTVLGGGGSQVQLQESGPGLVKPSQTLSLTCTVSGGSISTSGMGVGWIRQHPGKGLEWIGHIWWDDDKRYNPALKSRVTISVDTSKNQFSLKLSSVTAADTAVYYCARMELWSYYFDYWGQGTLVTVSSASTKGPSVFPLAPSSKSTSGGTAALGCLVKDYFPEPVTVSWNSGALTSGVHTFPAVLQSSGLYSLSSVVTVPSSSLGTQTYICNVNHKPSNTKVDKKVEPKSCDKTHTCPPCPAPEAAGGPSVFLFPPKPKDTLMISRTPEVTCVVVDVSHEDPEVKFNWYVDGVEVHNAKTKPREEQYGSTYRVVSVLTVLHQDWLNGKEYKCKVSNKALGAPIEKTISKAKGQPREPQVYTLPPCRDELTKNQVSLWCLVKGFYPSDIAVEWESNGQPENNYKTTPPVLDSDGSFFLYSKLTVDKSRWQQGNVFSCSVMHEALHNHYTQKSLSLSP

SEQ ID NO: 980 - protein, 448 aa, synthetic construct
QVQLQESGPGLVKPSQTLSLTCTVSGGSISTSTMGVGWIRQHPGKGLEWIGFIWWDDDKRYNPNLKSRVTMSVDTSKNQFSLKLSSVTAADTAVYYCARMELWSYYFDYWGQGTLVTVSSASTKGPSVFPLAPSSKSTSGGTAALGCLVKDYFPEPVTVSWNSGALTSGVHTFPAVLQSSGLYSLSSVVTVPSSSLGTQTYICNVNHKPSNTKVDKKVEPKSCDKTHTCPPCPAPEAAGGPSVFLFPPKPKDTLMISRTPEVTCVVVDVSHEDPEVKFNWYVDGVEVHNAKTKPREEQYGSTYRVVSVLTVLHQDWLNGKEYKCKVSNKALGAPIEKTISKAKGQPREPQVYTLPPCRDELTKNQVSLWCLVKGFYPSDIAVEWESNGQPENNYKTTPPVLDSDGSFFLYSKLTVDKSRWQQGNVFSCSVMHEALHNHYTQKSLSLSP

SEQ ID NO: 981 - protein, 447 aa, synthetic construct
QVQLQESGPGLVKPSQTLSLTCTVSGGSIASGMGVSWIRQHPGKGLEWIGHIWWDDDKRYNPALKSRVTISVDTSKNQFSLKLSSVTAADTAVYYCARMELWSYYFDPWGQGTLVTVSSASTKGPSVFPLAPSSKSTSGGTAALGCLVKDYFPEPVTVSWNSGALTSGVHTFPAVLQSSGLYSLSSVVTVPSSSLGTQTYICNVNHKPSNTKVDKKVEPKSCDKTHTCPPCPAPEAAGGPSVFLFPPKPKDTLMISRTPEVTCVVVDVSHEDPEVKFNWYVDGVEVHNAKTKPREEQYGSTYRVVSVLTVLHQDWLNGKEYKCKVSNKALGAPIEKTISKAKGQPREPQVYTLPPCRDELTKNQVSLWCLVKGFYPSDIAVEWESNGQPENNYKTTPPVLDSDGSFFLYSKLTVDKSRWQQGNVFSCSVMHEALHNHYTQKSLSLSP

SEQ ID NO: 982 - protein, 448 aa, synthetic construct
QVQLQESGPGLVKPSQTLSLTCTVSGGSISTSTMGVGWIRQHPGKGLEWIGFIWWDDDKRYNPNLKSRVTMSVDTSKNQFSLKLSSVTAADTAVYYCARMELWSYYFDPWGQGTLVTVSSASTKGPSVFPLAPSSKSTSGGTAALGCLVKDYFPEPVTVSWNSGALTSGVHTFPAVLQSSGLYSLSSVVTVPSSSLGTQTYICNVNHKPSNTKVDKKVEPKSCDKTHTCPPCPAPEAAGGPSVFLFPPKPKDTLMISRTPEVTCVVVDVSHEDPEVKFNWYVDGVEVHNAKTKPREEQYGSTYRVVSVLTVLHQDWLNGKEYKCKVSNKALGAPIEKTISKAKGQPREPQVYTLPPCRDELTKNQVSLWCLVKGFYPSDIAVEWESNGQPENNYKTTPPVLDSDGSFFLYSKLTVDKSRWQQGNVFSCSVMHEALHNHYTQKSLSLSP

SEQ ID NO: 983 - protein, 694 aa, synthetic construct
QVQLVQSGAEVKKPGSSVKVSCKASGYSFTTYYIHWVRQAPGQCLEWMGWFFPGSGNIKYNEKFKGRVTITADTSTSTAYMELSSLRSEDTAVYYCAGSYYSYDVLDYWGQGTTVTVSSGGGGSGGGGSGGGGSDIQMTQSPSFLSASVGDRVTITCKASQNVGINVVWHQQKPGKAPKALIYSSSHRYSGVPSRFSGSGSGTEFTLTISSLQPEDFATYFCQQFKSYPLTFGCGTKLEIKGGGGSQVQLQESGPGLVKPSQTLSLTCTVSGGSISTSTMGVGWIRQHPGKGLEWIGFIWWDDDKRYNPNLKSRVTMSVDTSKNQFSLKLSSVTAADTAVYYCARMELWSYYFDYWGQGTLVTVSSASTKGPSVFPLAPSSKSTSGGTAALGCLVKDYFPEPVTVSWNSGALTSGVHTFPAVLQSSGLYSLSSVVTVPSSSLGTQTYICNVNHKPSNTKVDKKVEPKSCDKTHTCPPCPAPEAAGGPSVFLFPPKPKDTLMISRTPEVTCVVVDVSHEDPEVKFNWYVDGVEVHNAKTKPREEQYGSTYRVVSVLTVLHQDWLNGKEYKCKVSNKALGAPIEKTISKAKGQPREPQVYTLPPCRDELTKNQVSLWCLVKGFYPSDIAVEWESNGQPENNYKTTPPVLDSDGSFFLYSKLTVDKSRWQQGNVFSCSVMHEALHNHYTQKSLSLSP

SEQ ID NO: 984 - protein, 693 aa, synthetic construct
QVQLVQSGAEVKKPGSSVKVSCKASGYSFTTYYIHWVRQAPGQCLEWMGWFFPGSGNIKYNEKFKGRVTITADTSTSTAYMELSSLRSEDTAVYYCAGSYYSYDVLDYWGQGTTVTVSSGGGGSGGGGSGGGGSDIQMTQSPSFLSASVGDRVTITCKASQNVGINVVWHQQKPGKAPKALIYSSSHRYSGVPSRFSGSGSGTEFTLTISSLQPEDFATYFCQQFKSYPLTFGCGTKLEIKGGGGSQVQLQESGPGLVKPSQTLSLTCTVSGGSIASGMGVSWIRQHPGKGLEWIGHIWWDDDKRYNPALKSRVTISVDTSKNQFSLKLSSVTAADTAVYYCARMELWSYYFDPWGQGTLVTVSSASTKGPSVFPLAPSSKSTSGGTAALGCLVKDYFPEPVTVSWNSGALTSGVHTFPAVLQSSGLYSLSSVVTVPSSSLGTQTYICNVNHKPSNTKVDKKVEPKSCDKTHTCPPCPAPEAAGGPSVFLFPPKPKDTLMISRTPEVTCVVVDVSHEDPEVKFNWYVDGVEVHNAKTKPREEQYGSTYRVVSVLTVLHQDWLNGKEYKCKVSNKALGAPIEKTISKAKGQPREPQVYTLPPCRDELTKNQVSLWCLVKGFYPSDIAVEWESNGQPENNYKTTPPVLDSDGSFFLYSKLTVDKSRWQQGNVFSCSVMHEALHNHYTQKSLSLSP

SEQ ID NO: 985 - protein, 694 aa, synthetic construct
QVQLVQSGAEVKKPGSSVKVSCKASGYSFTTYYIHWVRQAPGQCLEWMGWFFPGSGNIKYNEKFKGRVTITADTSTSTAYMELSSLRSEDTAVYYCAGSYYSYDVLDYWGQGTTVTVSSGGGGSGGGGSGGGGSDIQMTQSPSFLSASVGDRVTITCKASQNVGINVVWHQQKPGKAPKALIYSSSHRYSGVPSRFSGSGSGTEFTLTISSLQPEDFATYFCQQFKSYPLTFGCGTKLEIKGGGGSQVQLQESGPGLVKPSQTLSLTCTVSGGSISTSTMGVGWIRQHPGKGLEWIGFIWWDDDKRYNPNLKSRVTMSVDTSKNQFSLKLSSVTAADTAVYYCARMELWSYYFDPWGQGTLVTVSSASTKGPSVFPLAPSSKSTSGGTAALGCLVKDYFPEPVTVSWNSGALTSGVHTFPAVLQSSGLYSLSSVVTVPSSSLGTQTYICNVNHKPSNTKVDKKVEPKSCDKTHTCPPCPAPEAAGGPSVFLFPPKPKDTLMISRTPEVTCVVVDVSHEDPEVKFNWYVDGVEVHNAKTKPREEQYGSTYRVVSVLTVLHQDWLNGKEYKCKVSNKALGAPIEKTISKAKGQPREPQVYTLPPCRDELTKNQVSLWCLVKGFYPSDIAVEWESNGQPENNYKTTPPVLDSDGSFFLYSKLTVDKSRWQQGNVFSCSVMHEALHNHYTQKSLSLSP

SEQ ID NO: 986 - protein, 448 aa, synthetic construct; identical to SEQ ID NO: 980

SEQ ID NO: 987 - protein, 447 aa, synthetic construct; identical to SEQ ID NO: 981

SEQ ID NO: 988 - protein, 448 aa, synthetic construct; identical to SEQ ID NO: 982

SEQ ID NO: 989 - protein, 702 aa, synthetic construct
EVQLVESGGGLVQPGGSLKLSCAASGFTFNKYAMNWVRQAPGKGLEWVARIRSKYNNYATYYADSVKDRFTISRDDSKNTAYLQMNNLKTEDTAVYYCVRHGNFGNSYISYWAYWGQGTLVTVSSGGGGSGGGGSGGGGSQTVVTQEPSLTVSPGGTVTLTCGSSTGAVTSGNYPNWVQQKPGQAPRGLIGGTKFLAPGTPARFSGSLLGGKAALTLSGVQPEDEAEYYCVLWYSNRWVFGGGTKLTVLGGGGSQVQLQESGPGLVKPSQTLSLTCTVSGGSISTSTMGVGWIRQHPGKGLEWIGFIWWDDDKRYNPNLKSRVTMSVDTSKNQFSLKLSSVTAADTAVYYCARMELWSYYFDYWGQGTLVTVSSASTKGPSVFPLAPSSKSTSGGTAALGCLVKDYFPEPVTVSWNSGALTSGVHTFPAVLQSSGLYSLSSVVTVPSSSLGTQTYICNVNHKPSNTKVDKKVEPKSCDKTHTCPPCPAPEAAGGPSVFLFPPKPKDTLMISRTPEVTCVVVDVSHEDPEVKFNWYVDGVEVHNAKTKPREEQYGSTYRVVSVLTVLHQDWLNGKEYKCKVSNKALGAPIEKTISKAKGQPREPQVYTLPPCRDELTKNQVSLWCLVKGFYPSDIAVEWESNGQPENNYKTTPPVLDSDGSFFLYSKLTVDKSRWQQGNVFSCSVMHEALHNHYTQKSLSLSP

SEQ ID NO: 990 - protein, 701 aa, synthetic construct
EVQLVESGGGLVQPGGSLKLSCAASGFTFNKYAMNWVRQAPGKGLEWVARIRSKYNNYATYYADSVKDRFTISRDDSKNTAYLQMNNLKTEDTAVYYCVRHGNFGNSYISYWAYWGQGTLVTVSSGGGGSGGGGSGGGGSQTVVTQEPSLTVSPGGTVTLTCGSSTGAVTSGNYPNWVQQKPGQAPRGLIGGTKFLAPGTPARFSGSLLGGKAALTLSGVQPEDEAEYYCVLWYSNRWVFGGGTKLTVLGGGGSQVQLQESGPGLVKPSQTLSLTCTVSGGSIASGMGVSWIRQHPGKGLEWIGHIWWDDDKRYNPALKSRVTISVDTSKNQFSLKLSSVTAADTAVYYCARMELWSYYFDPWGQGTLVTVSSASTKGPSVFPLAPSSKSTSGGTAALGCLVKDYFPEPVTVSWNSGALTSGVHTFPAVLQSSGLYSLSSVVTVPSSSLGTQTYICNVNHKPSNTKVDKKVEPKSCDKTHTCPPCPAPEAAGGPSVFLFPPKPKDTLMISRTPEVTCVVVDVSHEDPEVKFNWYVDGVEVHNAKTKPREEQYGSTYRVVSVLTVLHQDWLNGKEYKCKVSNKALGAPIEKTISKAKGQPREPQVYTLPPCRDELTKNQVSLWCLVKGFYPSDIAVEWESNGQPENNYKTTPPVLDSDGSFFLYSKLTVDKSRWQQGNVFSCSVMHEALHNHYTQKSLSLSP

SEQ ID NO: 991 - protein, 702 aa, synthetic construct
EVQLVESGGGLVQPGGSLKLSCAASGFTFNKYAMNWVRQAPGKGLEWVARIRSKYNNYATYYADSVKDRFTISRDDSKNTAYLQMNNLKTEDTAVYYCVRHGNFGNSYISYWAYWGQGTLVTVSSGGGGSGGGGSGGGGSQTVVTQEPSLTVSPGGTVTLTCGSSTGAVTSGNYPNWVQQKPGQAPRGLIGGTKFLAPGTPARFSGSLLGGKAALTLSGVQPEDEAEYYCVLWYSNRWVFGGGTKLTVLGGGGSQVQLQESGPGLVKPSQTLSLTCTVSGGSISTSTMGVGWIRQHPGKGLEWIGFIWWDDDKRYNPNLKSRVTMSVDTSKNQFSLKLSSVTAADTAVYYCARMELWSYYFDPWGQGTLVTVSSASTKGPSVFPLAPSSKSTSGGTAALGCLVKDYFPEPVTVSWNSGALTSGVHTFPAVLQSSGLYSLSSVVTVPSSSLGTQTYICNVNHKPSNTKVDKKVEPKSCDKTHTCPPCPAPEAAGGPSVFLFPPKPKDTLMISRTPEVTCVVVDVSHEDPEVKFNWYVDGVEVHNAKTKPREEQYGSTYRVVSVLTVLHQDWLNGKEYKCKVSNKALGAPIEKTISKAKGQPREPQVYTLPPCRDELTKNQVSLWCLVKGFYPSDIAVEWESNGQPENNYKTTPPVLDSDGSFFLYSKLTVDKSRWQQGNVFSCSVMHEALHNHYTQKSLSLSP

SEQ ID NO: 992-1000 - skipped (9 entries)

SEQ ID NO: 1001 - protein, 107 aa, synthetic construct; identical to SEQ ID NO: 35

SEQ ID NO: 1002 - protein, 107 aa, synthetic construct; identical to SEQ ID NO: 35

SEQ ID NO: 1003 - protein, 107 aa, synthetic construct
DIQMTQSPSFLSASVGDRVTITCKASQNVGNNVAWYQQKPGKAPKLLIYSSSHRYSGVPSRFSGSGSGTEFTLTISSLQPEDFATYFCQQFKSYPLTFGQGTKLEIK

SEQ ID NO: 1004 - protein, 107 aa, synthetic construct
DIQMTQSPSSLSASVGDRVTITCKASQNVGINVVWYQQKPGKAPKLLIYSSSHRYSGVPSRFSGSGSGTEFTLTISSLQPEDFATYYCQQFKSYPLTFGQGTKLEIK

SEQ ID NO: 1005 - protein, 107 aa, synthetic construct
DIQMTQSPSSLSASVGDRVTITCKASQNVGNNVAWYQQKPGKAPKLLIYSSSHRYSGVPSRFSGSGSGTEFTLTISSLQPEDFATYYCQQFKSYPLTFGQGTKLEIK

SEQ ID NO: 1006 - protein, 107 aa, synthetic construct
DIQMTQSPSSLSASVGDRVTITCRASQNVGNNVAWYQQKPGKAPKLLIYSSSHRYSGVPSRFSGSGSGTEFTLTISSLQPEDFATYYCQQFKSYPLTFGQGTKLEIK

SEQ ID NO: 1007 - protein, 107 aa, synthetic construct; identical to SEQ ID NO: 35

SEQ ID NO: 1008 - protein, 107 aa, synthetic construct; identical to SEQ ID NO: 39

SEQ ID NO: 1009 - protein, 119 aa, synthetic construct; identical to SEQ ID NO: 34

SEQ ID NO: 1010 - protein, 119 aa, synthetic construct; identical to SEQ ID NO: 36

SEQ ID NO: 1011 - protein, 119 aa, synthetic construct
QVQLVQSGAEVKKPGASVKVSCKASGYSFTTYYIHWVRQAPGQGLEWMGWIFPGSGNIKYNEKFKGRVTITADTSTSTAYMELSSLRSEDTAVYYCAGSYYSYDVLDYWGQGTLVTVSS

SEQ ID NO: 1012 - protein, 119 aa, synthetic construct
QVQLVQSGAEVKKPGASVKVSCKASGYSFTTYYIHWVRQAPGQGLEWMGWIYPGSGNIKYNEKFKGRVTITADTSTSTAYMELSSLRSEDTAVYYCAGSYYSYDVLDYWGQGTLVTVSS

SEQ ID NO: 1013 - protein, 119 aa, synthetic construct
QVQLVQSGAEVKKPGASVKVSCKASGYSFTTYYIHWVRQAPGQGLEWMGWIYPGSGNIKYNEKFKGRVTITADTSTSTAYMELSSLRSEDTAVYYCARSYYSYDVLDYWGQGTLVTVSS

SEQ ID NO: 1014 - protein, 119 aa, synthetic construct; identical to SEQ ID NO: 1013

SEQ ID NO: 1015 - protein, 119 aa, synthetic construct; identical to SEQ ID NO: 37

SEQ ID NO: 1016 - protein, 119 aa, synthetic construct; identical to SEQ ID NO: 38

SEQ ID NO: 1017 - protein, 241 aa, synthetic construct; identical to SEQ ID NO: 43

SEQ ID NO: 1018 - protein, 241 aa, synthetic construct; identical to SEQ ID NO: 44

SEQ ID NO: 1019 - protein, 241 aa, synthetic construct; identical to SEQ ID NO: 45

SEQ ID NO: 1020 - protein, 241 aa, synthetic construct; identical to SEQ ID NO: 46

SEQ ID NO: 1021 - protein, 241 aa, synthetic construct; identical to SEQ ID NO: 47

SEQ ID NO: 1022 - protein, 241 aa, synthetic construct; identical to SEQ ID NO: 48

SEQ ID NO: 1023 - protein, 241 aa, synthetic construct; identical to SEQ ID NO: 49

SEQ ID NO: 1024 - protein, 241 aa, synthetic construct; identical to SEQ ID NO: 50

SEQ ID NO: 1025 - protein, 241 aa, synthetic construct; identical to SEQ ID NO: 51

SEQ ID NO: 1026 - protein, 241 aa, synthetic construct; identical to SEQ ID NO: 52

SEQ ID NO: 1027 - protein, 241 aa, synthetic construct; identical to SEQ ID NO: 53

SEQ ID NO: 1028 - protein, 241 aa, synthetic construct; identical to SEQ ID NO: 54

SEQ ID NO: 1029 - protein, 241 aa, synthetic construct; identical to SEQ ID NO: 55

SEQ ID NO: 1030 - protein, 241 aa, synthetic construct; identical to SEQ ID NO: 56

SEQ ID NO: 1031 - protein, 241 aa, synthetic construct; identical to SEQ ID NO: 57

SEQ ID NO: 1032 - protein, 241 aa, synthetic construct; identical to SEQ ID NO: 58

SEQ ID NO: 1033 - protein, 241 aa, synthetic construct; identical to SEQ ID NO: 59

SEQ ID NO: 1034 - protein, 241 aa, synthetic construct; identical to SEQ ID NO: 60

SEQ ID NO: 1035 - protein, 241 aa, synthetic construct; identical to SEQ ID NO: 61

SEQ ID NO: 1036 - protein, 241 aa, synthetic construct; identical to SEQ ID NO: 62

SEQ ID NO: 1037 - protein, 241 aa, synthetic construct; identical to SEQ ID NO: 63

SEQ ID NO: 1038 - protein, 241 aa, synthetic construct; identical to SEQ ID NO: 64

SEQ ID NO: 1039 - protein, 241 aa, synthetic construct; identical to SEQ ID NO: 65

SEQ ID NO: 1040 - protein, 241 aa, synthetic construct; identical to SEQ ID NO: 66

SEQ ID NO: 1041 - protein, 241 aa, synthetic construct; identical to SEQ ID NO: 67

SEQ ID NO: 1042 - protein, 241 aa, synthetic construct; identical to SEQ ID NO: 68

SEQ ID NO: 1043 - protein, 241 aa, synthetic construct; identical to SEQ ID NO: 69

SEQ ID NO: 1044 - protein, 241 aa, synthetic construct; identical to SEQ ID NO: 70

SEQ ID NO: 1045 - protein, 241 aa, synthetic construct; identical to SEQ ID NO: 71

SEQ ID NO: 1046 - protein, 241 aa, synthetic construct; identical to SEQ ID NO: 72

SEQ ID NO: 1047 - protein, 241 aa, synthetic construct; identical to SEQ ID NO: 73

SEQ ID NO: 1048 - protein, 241 aa, synthetic construct; identical to SEQ ID NO: 74

SEQ ID NO: 1049 - protein, 241 aa, synthetic construct; identical to SEQ ID NO: 75

SEQ ID NO: 1050 - protein, 241 aa, synthetic construct; identical to SEQ ID NO: 76

SEQ ID NO: 1051 - protein, 241 aa, synthetic construct; identical to SEQ ID NO: 77

SEQ ID NO: 1052 - protein, 241 aa, synthetic construct; identical to SEQ ID NO: 78

SEQ ID NO: 1053 - protein, 241 aa, synthetic construct; identical to SEQ ID NO: 79

SEQ ID NO: 1054 - protein, 241 aa, synthetic construct; identical to SEQ ID NO: 80

SEQ ID NO: 1055 - protein, 214 aa, synthetic construct
DIQMTQSPSFLSASVGDRVTITCKASQNVGINVVWHQQKPGKAPKALIYSSSHRYSGVPSRFSGSGSGTEFTLTISSLQPEDFATYFCQQFKSYPLTFGQGTKLEIKRTVAAPSVFIFPPSDEQLKSGTASVVCLLNNFYPREAKVQWKVDNALQSGNSQESVTEQDSKDSTYSLSSTLTLSKADYEKHKVYACEVTHQGLSSPVTKSFNRGEC

SEQ ID NO: 1056 - protein, 214 aa, synthetic construct; identical to SEQ ID NO: 1055

SEQ ID NO: 1057 - protein, 214 aa, synthetic construct
DIQMTQSPSFLSASVGDRVTITCKASQNVGNNVAWYQQKPGKAPKLLIYSSSHRYSGVPSRFSGSGSGTEFTLTISSLQPEDFATYFCQQFKSYPLTFGQGTKLEIKRTVAAPSVFIFPPSDEQLKSGTASVVCLLNNFYPREAKVQWKVDNALQSGNSQESVTEQDSKDSTYSLSSTLTLSKADYEKHKVYACEVTHQGLSSPVTKSFNRGEC

SEQ ID NO: 1058 - protein, 214 aa, synthetic construct
DIQMTQSPSSLSASVGDRVTITCKASQNVGINVVWYQQKPGKAPKLLIYSSSHRYSGVPSRFSGSGSGTEFTLTISSLQPEDFATYYCQQFKSYPLTFGQGTKLEIKRTVAAPSVFIFPPSDEQLKSGTASVVCLLNNFYPREAKVQWKVDNALQSGNSQESVTEQDSKDSTYSLSSTLTLSKADYEKHKVYACEVTHQGLSSPVTKSFNRGEC

SEQ ID NO: 1059 - protein, 214 aa, synthetic construct
DIQMTQSPSSLSASVGDRVTITCKASQNVGNNVAWYQQKPGKAPKLLIYSSSHRYSGVPSRFSGSGSGTEFTLTISSLQPEDFATYYCQQFKSYPLTFGQGTKLEIKRTVAAPSVFIFPPSDEQLKSGTASVVCLLNNFYPREAKVQWKVDNALQSGNSQESVTEQDSKDSTYSLSSTLTLSKADYEKHKVYACEVTHQGLSSPVTKSFNRGEC

SEQ ID NO: 1060 - protein, 214 aa, synthetic construct
DIQMTQSPSSLSASVGDRVTITCRASQNVGNNVAWYQQKPGKAPKLLIYSSSHRYSGVPSRFSGSGSGTEFTLTISSLQPEDFATYYCQQFKSYPLTFGQGTKLEIKRTVAAPSVFIFPPSDEQLKSGTASVVCLLNNFYPREAKVQWKVDNALQSGNSQESVTEQDSKDSTYSLSSTLTLSKADYEKHKVYACEVTHQGLSSPVTKSFNRGEC

SEQ ID NO: 1061 - protein, 214 aa, synthetic construct; identical to SEQ ID NO: 1055

SEQ ID NO: 1062 - protein, 214 aa, synthetic construct
DIQMTQSPSFLSASVGDRVTITCKASQNVADRVVWHQQKPGKAPKALIYSSSHRYKGVPSRFSGSGSGTEFTLTISSLQPEDFATYFCQQFKSYPLTFGQGTKLEIKRTVAAPSVFIFPPSDEQLKSGTASVVCLLNNFYPREAKVQWKVDNALQSGNSQESVTEQDSKDSTYSLSSTLTLSKADYEKHKVYACEVTHQGLSSPVTKSFNRGEC

SEQ ID NO: 1063 - protein, 226 aa, synthetic construct; identical to SEQ ID NO: 689

SEQ ID NO: 1064 - protein, 226 aa, synthetic construct
QVQLVQSGAEVKKPGASVKVSCKASGYSFTTYYIHWVRQAPGQGLEWMGWFFPGSGNIKYNEKFKGRVTITADTSTSTAYMELSSLRSEDTAVYYCAGSYYSYDVLDYWGQGTLVTVSSASVAAPSVFIFPPSDEQLKSGTASVVCLLNNFYPREAKVQWKVDNALQSGNSQESVTEQDSKDSTYSLSSTLTLSKADYEKHKVYACEVTHQGLSSPVTKSFNRGEC

SEQ ID NO: 1065 - protein, 226 aa, synthetic construct
QVQLVQSGAEVKKPGASVKVSCKASGYSFTTYYIHWVRQAPGQGLEWMGWIFPGSGNIKYNEKFKGRVTITADTSTSTAYMELSSLRSEDTAVYYCAGSYYSYDVLDYWGQGTLVTVSSASVAAPSVFIFPPSDEQLKSGTASVVCLLNNFYPREAKVQWKVDNALQSGNSQESVTEQDSKDSTYSLSSTLTLSKADYEKHKVYACEVTHQGLSSPVTKSFNRGEC

SEQ ID NO: 1066 - protein, 226 aa, synthetic construct
QVQLVQSGAEVKKPGASVKVSCKASGYSFTTYYIHWVRQAPGQGLEWMGWIYPGSGNIKYNEKFKGRVTITADTSTSTAYMELSSLRSEDTAVYYCAGSYYSYDVLDYWGQGTLVTVSSASVAAPSVFIFPPSDEQLKSGTASVVCLLNNFYPREAKVQWKVDNALQSGNSQESVTEQDSKDSTYSLSSTLTLSKADYEKHKVYACEVTHQGLSSPVTKSFNRGEC

SEQ ID NO: 1067 - protein, 226 aa, synthetic construct
QVQLVQSGAEVKKPGASVKVSCKASGYSFTTYYIHWVRQAPGQGLEWMGWIYPGSGNIKYNEKFKGRVTITADTSTSTAYMELSSLRSEDTAVYYCARSYYSYDVLDYWGQGTLVTVSSASVAAPSVFIFPPSDEQLKSGTASVVCLLNNFYPREAKVQWKVDNALQSGNSQESVTEQDSKDSTYSLSSTLTLSKADYEKHKVYACEVTHQGLSSPVTKSFNRGEC

SEQ ID NO: 1068 - protein, 226 aa, synthetic construct; identical to SEQ ID NO: 1067

SEQ ID NO: 1069 - protein, 226 aa, synthetic construct
QVQLVQSGAEVKKPGSSVKVSCKASGYSFRLTYIHWVRQAPGQGLEWMGWFFPGSGNIKYNEKFKGRVTITADTSTSTAYMELSSLRSEDTAVYYCAGSYYSYDVLDYWGQGTTVTVSSASVAAPSVFIFPPSDEQLKSGTASVVCLLNNFYPREAKVQWKVDNALQSGNSQESVTEQDSKDSTYSLSSTLTLSKADYEKHKVYACEVTHQGLSSPVTKSFNRGEC

SEQ ID NO: 1070 - protein, 226 aa, synthetic construct; identical to SEQ ID NO: 725

SEQ ID NO: 1071 - protein, 222 aa, synthetic construct
QVQLVQSGAEVKKPGSSVKVSCKASGYSFTTYYIHWVRQAPGQGLEWMGWFFPGSGNIKYNEKFKGRVTITADTSTSTAYMELSSLRSEDTAVYYCAGSYYSYDVLDYWGQGTTVTVSSASTKGPSVFPLAPSSKSTSGGTAALGCLVKDYFPEPVTVSWNSGALTSGVHTFPAVLQSSGLYSLSSVVTVPSSSLGTQTYICNVNHKPSNTKVDKKVEPKSC

SEQ ID NO: 1072 - protein, 222 aa, synthetic construct
QVQLVQSGAEVKKPGASVKVSCKASGYSFTTYYIHWVRQAPGQGLEWMGWFFPGSGNIKYNEKFKGRVTITADTSTSTAYMELSSLRSEDTAVYYCAGSYYSYDVLDYWGQGTLVTVSSASTKGPSVFPLAPSSKSTSGGTAALGCLVKDYFPEPVTVSWNSGALTSGVHTFPAVLQSSGLYSLSSVVTVPSSSLGTQTYICNVNHKPSNTKVDKKVEPKSC

SEQ ID NO: 1073 - protein, 222 aa, synthetic construct
QVQLVQSGAEVKKPGASVKVSCKASGYSFTTYYIHWVRQAPGQGLEWMGWIFPGSGNIKYNEKFKGRVTITADTSTSTAYMELSSLRSEDTAVYYCAGSYYSYDVLDYWGQGTLVTVSSASTKGPSVFPLAPSSKSTSGGTAALGCLVKDYFPEPVTVSWNSGALTSGVHTFPAVLQSSGLYSLSSVVTVPSSSLGTQTYICNVNHKPSNTKVDKKVEPKSC

SEQ ID NO: 1074 - protein, 222 aa, synthetic construct
QVQLVQSGAEVKKPGASVKVSCKASGYSFTTYYIHWVRQAPGQGLEWMGWIYPGSGNIKYNEKFKGRVTITADTSTSTAYMELSSLRSEDTAVYYCAGSYYSYDVLDYWGQGTLVTVSSASTKGPSVFPLAPSSKSTSGGTAALGCLVKDYFPEPVTVSWNSGALTSGVHTFPAVLQSSGLYSLSSVVTVPSSSLGTQTYICNVNHKPSNTKVDKKVEPKSC

SEQ ID NO: 1075 - protein, 222 aa, synthetic construct
QVQLVQSGAEVKKPGASVKVSCKASGYSFTTYYIHWVRQAPGQGLEWMGWIYPGSGNIKYNEKFKGRVTITADTSTSTAYMELSSLRSEDTAVYYCARSYYSYDVLDYWGQGTLVTVSSASTKGPSVFPLAPSSKSTSGGTAALGCLVKDYFPEPVTVSWNSGALTSGVHTFPAVLQSSGLYSLSSVVTVPSSSLGTQTYICNVNHKPSNTKVDKKVEPKSC

SEQ ID NO: 1076 - protein, 222 aa, synthetic construct; identical to SEQ ID NO: 1075

SEQ ID NO: 1077 - protein, 222 aa, synthetic construct
QVQLVQSGAEVKKPGSSVKVSCKASGYSFRLTYIHWVRQAPGQGLEWMGWFFPGSGNIKYNEKFKGRVTITADTSTSTAYMELSSLRSEDTAVYYCAGSYYSYDVLDYWGQGTTVTVSSASTKGPSVFPLAPSSKSTSGGTAALGCLVKDYFPEPVTVSWNSGALTSGVHTFPAVLQSSGLYSLSSVVTVPSSSLGTQTYICNVNHKPSNTKVDKKVEPKSC

SEQ ID NO: 1078 - protein, 222 aa, synthetic construct
QVQLVQSGAEVKKPGSSVKVSCKASGHDFRLTYIHWVRQAPGQGLEWMGRVSAGSGNVKYNEKFKGRVTITADTSTSTAYMELSSLRSEDTAVYYCAVSYYSYDVLDYWGQGTTVTVSSASTKGPSVFPLAPSSKSTSGGTAALGCLVKDYFPEPVTVSWNSGALTSGVHTFPAVLQSSGLYSLSSVVTVPSSSLGTQTYICNVNHKPSNTKVDKKVEPKSC

SEQ ID NO: 1079 - protein, 212 aa, synthetic construct; identical to SEQ ID NO: 697

SEQ ID NO: 1080 - protein, 212 aa, synthetic construct; identical to SEQ ID NO: 697

SEQ ID NO: 1081 - protein, 212 aa, synthetic construct; identical to SEQ ID NO: 699

SEQ ID NO: 1082 - protein, 212 aa, synthetic construct; identical to SEQ ID NO: 700

SEQ ID NO: 1083 - protein, 212 aa, synthetic construct; identical to SEQ ID NO: 701

SEQ ID NO: 1084 - protein, 212 aa, synthetic construct; identical to SEQ ID NO: 702

SEQ ID NO: 1085 - protein, 212 aa, synthetic construct; identical to SEQ ID NO: 697

SEQ ID NO: 1086 - protein, 212 aa, synthetic construct
DIQMTQSPSFLSASVGDRVTITCKASQNVADRVVWHQQKPGKAPKALIYSSSHRYKGVPSRFSGSGSGTEFTLTISSLQPEDFATYFCQQFKSYPLTFGQGTKLEIKSSASTKGPSVFPLAPSSKSTSGGTAALGCLVKDYFPEPVTVSWNSGALTSGVHTFPAVLQSSGLYSLSSVVTVPSSSLGTQTYICNVNHKPSNTKVDKKVEPKSC

SEQ ID NO: 1087 - protein, 106 aa, synthetic construct; identical to SEQ ID NO: 41

SEQ ID NO: 1088 - protein, 106 aa, synthetic construct; identical to SEQ ID NO: 41

SEQ ID NO: 1089 - protein, 106 aa, synthetic construct
DIQLTQSPSFLSASVGDRVTITCRASSSVNYIYWYQQKPGKAPKLLIYYTSNLAPGVPSRFSGSGSGTEFTLTISSLQPEDFATYYCQQYTSSPFTFGQGTKLEIK

SEQ ID NO: 1090 - protein, 106 aa, synthetic construct
DIQLTQSPSFLSASVGDRVTITCRASQSVNYIYWYQQKPGKAPKLLIYYTSNLAPGVPSRFSGSGSGTEFTLTISSLQPEDFATYYCQQYTSSPFTFGQGTKLEIK

SEQ ID NO: 1091 - protein, 106 aa, synthetic construct
DIQLTQSPSFLSASVGDRVTITCRASQSVNYLYWYQQKPGKAPKLLIYYTSNLAPGVPSRFSGSGSGTEFTLTISSLQPEDFATYYCQQYTSSPFTFGQGTKLEIK

SEQ ID NO: 1092 - protein, 106 aa, synthetic construct; identical to SEQ ID NO: 1091

SEQ ID NO: 1093 - protein, 117 aa, synthetic construct; identical to SEQ ID NO: 40

SEQ ID NO: 1094 - protein, 117 aa, synthetic construct; identical to SEQ ID NO: 42

SEQ ID NO: 1095 - protein, 117 aa, synthetic construct; identical to SEQ ID NO: 42

SEQ ID NO: 1096 - protein, 117 aa, synthetic construct; identical to SEQ ID NO: 42

SEQ ID NO: 1097 - protein, 117 aa, synthetic construct; identical to SEQ ID NO: 42

SEQ ID NO: 1098 - protein, 117 aa, synthetic construct
EVQLVESGGGLVQPGGSLRLSCAASGFTFSNYGMHWVRQAPGKGLEWVSYISSGSSTIYYADALKGRFTISRDNSKNTLYLQMNSLRAEDTAVYYCARRGEGAMDYWGQGTLVTVSS

SEQ ID NO: 1099 - protein, 238 aa, synthetic construct; identical to SEQ ID NO: 81

SEQ ID NO: 1100 - protein, 213 aa, synthetic construct
DNQLTQSPSFLSASVGDRVTITCRASSSVNYIYWYQQKPGKAPKLLIYYTSNLAPGVPSRFSGSGSGNEYTLTISSLQPEDFATYYCQQFTSSPFTFGQGTKLEIKRTVAAPSVFIFPPSDEQLKSGTASVVCLLNNFYPREAKVQWKVDNALQSGNSQESVTEQDSKDSTYSLSSTLTLSKADYEKHKVYACEVTHQGLSSPVTKSFNRGEC

SEQ ID NO: 1101 - protein, 213 aa, synthetic construct; identical to SEQ ID NO: 1100

SEQ ID NO: 1102 - protein, 213 aa, synthetic construct
DIQLTQSPSFLSASVGDRVTITCRASSSVNYIYWYQQKPGKAPKLLIYYTSNLAPGVPSRFSGSGSGTEFTLTISSLQPEDFATYYCQQYTSSPFTFGQGTKLEIKRTVAAPSVFIFPPSDEQLKSGTASVVCLLNNFYPREAKVQWKVDNALQSGNSQESVTEQDSKDSTYSLSSTLTLSKADYEKHKVYACEVTHQGLSSPVTKSFNRGEC

SEQ ID NO: 1103 - protein, 213 aa, synthetic construct
DIQLTQSPSFLSASVGDRVTITCRASQSVNYIYWYQQKPGKAPKLLIYYTSNLAPGVPSRFSGSGSGTEFTLTISSLQPEDFATYYCQQYTSSPFTFGQGTKLEIKRTVAAPSVFIFPPSDEQLKSGTASVVCLLNNFYPREAKVQWKVDNALQSGNSQESVTEQDSKDSTYSLSSTLTLSKADYEKHKVYACEVTHQGLSSPVTKSFNRGEC

SEQ ID NO: 1104 - protein, 213 aa, synthetic construct
DIQLTQSPSFLSASVGDRVTITCRASQSVNYLYWYQQKPGKAPKLLIYYTSNLAPGVPSRFSGSGSGTEFTLTISSLQPEDFATYYCQQYTSSPFTFGQGTKLEIKRTVAAPSVFIFPPSDEQLKSGTASVVCLLNNFYPREAKVQWKVDNALQSGNSQESVTEQDSKDSTYSLSSTLTLSKADYEKHKVYACEVTHQGLSSPVTKSFNRGEC

SEQ ID NO: 1105 - protein, 213 aa, synthetic construct; identical to SEQ ID NO: 1104

SEQ ID NO: 1106 - protein, 224 aa, synthetic construct; identical to SEQ ID NO: 690

SEQ ID NO: 1107 - protein, 224 aa, synthetic construct
EVQLVESGGGLVQPGGSLRLSCAASGFTFSNFGMHWVRQAPGKGLEWVSYISSGSSTIYYADTLKGRFTISRDNSKNTLYLQMNSLRAEDTAVYYCARRGEGAMDYWGQGTLVTVSSASVAAPSVFIFPPSDEQLKSGTASVVCLLNNFYPREAKVQWKVDNALQSGNSQESVTEQDSKDSTYSLSSTLTLSKADYEKHKVYACEVTHQGLSSPVTKSFNRGEC

SEQ ID NO: 1108 - protein, 224 aa, synthetic construct; identical to SEQ ID NO: 1107

SEQ ID NO: 1109 - protein, 224 aa, synthetic construct; identical to SEQ ID NO: 1107

SEQ ID NO: 1110 - protein, 224 aa, synthetic construct; identical to SEQ ID NO: 1107

SEQ ID NO: 1111 - protein, 224 aa, synthetic construct
EVQLVESGGGLVQPGGSLRLSCAASGFTFSNYGMHWVRQAPGKGLEWVSYISSGSSTIYYADALKGRFTISRDNSKNTLYLQMNSLRAEDTAVYYCARRGEGAMDYWGQGTLVTVSSASVAAPSVFIFPPSDEQLKSGTASVVCLLNNFYPREAKVQWKVDNALQSGNSQESVTEQDSKDSTYSLSSTLTLSKADYEKHKVYACEVTHQGLSSPVTKSFNRGEC

SEQ ID NO: 1112 - protein, 220 aa, synthetic construct
EVQLVESGGGLVQPGGSLRLSCAASGFTFSNFGMHWVRQAPGKGLEWVSYISSGSSTIYYADTLKGRFTISRDNSKNTLYLQMNSLRAEDTAVYYCARRGEGAMDYWGQGTTVTVSSASTKGPSVFPLAPSSKSTSGGTAALGCLVKDYFPEPVTVSWNSGALTSGVHTFPAVLQSSGLYSLSSVVTVPSSSLGTQTYICNVNHKPSNTKVDKKVEPKSC

SEQ ID NO: 1113 - protein, 220 aa, synthetic construct
EVQLVESGGGLVQPGGSLRLSCAASGFTFSNFGMHWVRQAPGKGLEWVSYISSGSSTIYYADTLKGRFTISRDNSKNTLYLQMNSLRAEDTAVYYCARRGEGAMDYWGQGTLVTVSSASTKGPSVFPLAPSSKSTSGGTAALGCLVKDYFPEPVTVSWNSGALTSGVHTFPAVLQSSGLYSLSSVVTVPSSSLGTQTYICNVNHKPSNTKVDKKVEPKSC

SEQ ID NO: 1114 - protein, 220 aa, synthetic construct; identical to SEQ ID NO: 1113

SEQ ID NO: 1115 - protein, 220 aa, synthetic construct; identical to SEQ ID NO: 1113

SEQ ID NO: 1116 - protein, 220 aa, synthetic construct; identical to SEQ ID NO: 1113

SEQ ID NO: 1117 - protein, 220 aa, synthetic construct
EVQLVESGGGLVQPGGSLRLSCAASGFTFSNYGMHWVRQAPGKGLEWVSYISSGSSTIYYADALKGRFTISRDNSKNTLYLQMNSLRAEDTAVYYCARRGEGAMDYWGQGTLVTVSSASTKGPSVFPLAPSSKSTSGGTAALGCLVKDYFPEPVTVSWNSGALTSGVHTFPAVLQSSGLYSLSSVVTVPSSSLGTQTYICNVNHKPSNTKVDKKVEPKSC

SEQ ID NO: 1118 - protein, 211 aa, synthetic construct; identical to SEQ ID NO: 709

SEQ ID NO: 1119 - protein, 211 aa, synthetic construct; identical to SEQ ID NO: 710

SEQ ID NO: 1120 - protein, 211 aa, synthetic construct; identical to SEQ ID NO: 711

SEQ ID NO: 1121 - protein, 211 aa, synthetic construct; identical to SEQ ID NO: 712

SEQ ID NO: 1122 - protein, 211 aa, synthetic construct; identical to SEQ ID NO: 713

SEQ ID NO: 1123 - protein, 211 aa, synthetic construct; identical to SEQ ID NO: 713

SEQ ID NO: 1124 - protein, 107 aa, synthetic construct; identical to SEQ ID NO: 147

SEQ ID NO: 1125 - protein, 121 aa, synthetic construct; identical to SEQ ID NO: 146

SEQ ID NO: 1126 - protein, 243 aa, synthetic construct; identical to SEQ ID NO: 148

SEQ ID NO: 1127 - protein, 214 aa, synthetic construct
DIVMTQSQKFLSTSVGDRVSVTCKARQNVGSNVAWYQQKPGQSPKSLIYSSSFRYSGVPDRFTGSGSGTDFTLTISNVQSEDLAEYFCQQYNTYPYTFGGGTELEIKRTVAAPSVFIFPPSDEQLKSGTASVVCLLNNFYPREAKVQWKVDNALQSGNSQESVTEQDSKDSTYSLSSTLTLSKADYEKHKVYACEVTHQGLSSPVTKSFNRGEC

SEQ ID NO: 1128 - protein, 228 aa, synthetic construct; identical to SEQ ID NO: 696

SEQ ID NO: 1129 - protein, 224 aa, synthetic construct
EVQLQQSGAELVKPGASVKLSCTASGFNIKDTHMHWVKQRPEQGLEWIGRTDPASGDTKYDPKFQGKATITADTSSNTAYLHLSSLTSEDTAVYYCAHYYRDDVNYAMDYWGQGTTVTVSSASTKGPSVFPLAPSSKSTSGGTAALGCLVKDYFPEPVTVSWNSGALTSGVHTFPAVLQSSGLYSLSSVVTVPSSSLGTQTYICNVNHKPSNTKVDKKVEPKSC

SEQ ID NO: 1130 - protein, 212 aa, synthetic construct
DIVMTQSQKFLSTSVGDRVSVTCKARQNVGSNVAWYQQKPGQSPKSLIYSSSFRYSGVPDRFTGSGSGTDFTLTISNVQSEDLAEYFCQQYNTYPYTFGGGTELEIKSSASTKGPSVFPLAPSSKSTSGGTAALGCLVKDYFPEPVTVSWNSGALTSGVHTFPAVLQSSGLYSLSSVVTVPSSSLGTQTYICNVNHKPSNTKVDKKVEPKSC

SEQ ID NO: 1131 - protein, 20 aa, synthetic construct
ASPAAPAPASPAAPAPSAPA

SEQ ID NO: 1132 - protein, 20 aa, synthetic construct
AAPASPAPAAPSAPAPAAPS

SEQ ID NO: 1133 - protein, 20 aa, synthetic construct
APSSPSPSAPSSPSPASPSS

SEQ ID NO: 1134 - protein, 19 aa, synthetic construct
APSSPSPSAPSSPSPASPS

SEQ ID NO: 1135 - protein, 20 aa, synthetic construct
SSPSAPSPSSPASPSPSSPA

SEQ ID NO: 1136 - protein, 24 aa, synthetic construct
AASPAAPSAPPAAASPAAPSAPPA

SEQ ID NO: 1137 - protein, 20 aa, synthetic construct
ASAAAPAAASAAASAPSAAA

SEQ ID NO: 1138 - protein, 5 aa, synthetic construct
LYYIH

SEQ ID NO: 1139 - protein, 10 aa, synthetic construct
SYYSFDVLDY

SEQ ID NO: 1140 - protein, 11 aa, synthetic construct
KASQNVGIRVV

SEQ ID NO: 1141 - protein, 9 aa, synthetic construct
QQFKSYPIT

SEQ ID NO: 1142 - protein, 17 aa, synthetic construct
WFFPRSGNIKYNEKFKG

SEQ ID NO: 1143 - protein, 8 aa, synthetic construct
GYSFTLYY

SEQ ID NO: 1144 - protein, 12 aa, synthetic construct
AASYYSFDVLDY

SEQ ID NO: 1145 - protein, 6 aa, synthetic construct
QNVGIR

SEQ ID NO: 1146 - protein, 9 aa, synthetic construct
QQFKSYPIT

SEQ ID NO: 1147 - protein, 8 aa, synthetic construct
FFPRSGNI

SEQ ID NO: 1148 - protein, 119 aa, synthetic construct
QVQLVQSGAEVKKPGSSVKVSCKASGYSFTLYYIHWVRQAPGQGLEWMGWFFPGSGNIKYNEKFKGRVTITADTSTSTAYMELSSLRSEDTAVYYCAASYYSFDVLDYWGQGTTVTVSS

SEQ ID NO: 1149 - protein, 107 aa, synthetic construct
DIQMTQSPSFLSASVGDRVTITCKASQNVGIRVVWHQQKPGKAPKALIYSSSHRYSGVPSRFSGSGSGTEFTLTISSLQPEDFATYFCQQFKSYPITFGQGTKLEIK

SEQ ID NO: 1150 - protein, 119 aa, synthetic construct
QVQLVQSGAEVKKPGSSVKVSCKASGYSFTTYYIHWVRQAPGQGLEWMGWFFPRSGNIKYNEKFKGRVTITADTSTSTAYMELSSLRSEDTAVYYCAASYYSFDVLDYWGQGTTVTVSS

SEQ ID NO: 1151 - protein, 241 aa, synthetic construct
QVQLVQSGAEVKKPGSSVKVSCKASGYSFTLYYIHWVRQAPGQGLEWMGWFFPGSGNIKYNEKFKGRVTITADTSTSTAYMELSSLRSEDTAVYYCAASYYSFDVLDYWGQGTTVTVSSGGGGSGGGGSGGGGSDIQMTQSPSFLSASVGDRVTITCKASQNVGIRVVWHQQKPGKAPKALIYSSSHRYSGVPSRFSGSGSGTEFTLTISSLQPEDFATYFCQQFKSYPITFGQGTKLEIK

SEQ ID NO: 1152 - protein, 241 aa, synthetic construct
QVQLVQSGAEVKKPGSSVKVSCKASGYSFTLYYIHWVRQAPGQCLEWMGWFFPGSGNIKYNEKFKGRVTITADTSTSTAYMELSSLRSEDTAVYYCAASYYSFDVLDYWGQGTTVTVSSGGGGSGGGGSGGGGSDIQMTQSPSFLSASVGDRVTITCKASQNVGIRVVWHQQKPGKAPKALIYSSSHRYSGVPSRFSGSGSGTEFTLTISSLQPEDFATYFCQQFKSYPITFGCGTKLEIK

SEQ ID NO: 1153 - protein, 241 aa, synthetic construct
QVQLVQSGAEVKKPGSSVKVSCKASGYSFTTYYIHWVRQAPGQGLEWMGWFFPRSGNIKYNEKFKGRVTITADTSTSTAYMELSSLRSEDTAVYYCAASYYSFDVLDYWGQGTTVTVSSGGGGSGGGGSGGGGSDIQMTQSPSFLSASVGDRVTITCKASQNVGIRVVWHQQKPGKAPKALIYSSSHRYSGVPSRFSGSGSGTEFTLTISSLQPEDFATYFCQQFKSYPITFGQGTKLEIK

SEQ ID NO: 1154 - protein, 241 aa, synthetic construct
QVQLVQSGAEVKKPGSSVKVSCKASGYSFTTYYIHWVRQAPGQCLEWMGWFFPRSGNIKYNEKFKGRVTITADTSTSTAYMELSSLRSEDTAVYYCAASYYSFDVLDYWGQGTTVTVSSGGGGSGGGGSGGGGSDIQMTQSPSFLSASVGDRVTITCKASQNVGIRVVWHQQKPGKAPKALIYSSSHRYSGVPSRFSGSGSGTEFTLTISSLQPEDFATYFCQQFKSYPITFGCGTKLEIK

SEQ ID NO: 1155 - protein, 222 aa, synthetic construct
QVQLVQSGAEVKKPGSSVKVSCKASGYSFTLYYIHWVRQAPGQGLEWMGWFFPGSGNIKYNEKFKGRVTITADTSTSTAYMELSSLRSEDTAVYYCAASYYSFDVLDYWGQGTTVTVSSASTKGPSVFPLAPSSKSTSGGTAALGCLVKDYFPEPVTVSWNSGALTSGVHTFPAVLQSSGLYSLSSVVTVPSSSLGTQTYICNVNHKPSNTKVDKKVEPKSC

SEQ ID NO: 1156 - protein, 214 aa, synthetic construct
DIQMTQSPSFLSASVGDRVTITCKASQNVGIRVVWHQQKPGKAPKALIYSSSHRYSGVPSRFSGSGSGTEFTLTISSLQPEDFATYFCQQFKSYPITFGQGTKLEIKRTVAAPSVFIFPPSDEQLKSGTASVVCLLNNFYPREAKVQWKVDNALQSGNSQESVTEQDSKDSTYSLSSTLTLSKADYEKHKVYACEVTHQGLSSPVTKSFNRGEC

SEQ ID NO: 1157 - protein, 222 aa, synthetic construct
QVQLVQSGAEVKKPGSSVKVSCKASGYSFTTYYIHWVRQAPGQGLEWMGWFFPRSGNIKYNEKFKGRVTITADTSTSTAYMELSSLRSEDTAVYYCAASYYSFDVLDYWGQGTTVTVSSASTKGPSVFPLAPSSKSTSGGTAALGCLVKDYFPEPVTVSWNSGALTSGVHTFPAVLQSSGLYSLSSVVTVPSSSLGTQTYICNVNHKPSNTKVDKKVEPKSC

SEQ ID NO: 1158 - protein, 214 aa, synthetic construct; identical to SEQ ID NO: 1156

SEQ ID NO: 1159 - protein, 225 aa, synthetic construct; identical to SEQ ID NO: 154

SEQ ID NO: 1160 - protein, 225 aa, synthetic construct; identical to SEQ ID NO: 154

SEQ ID NO: 1161 - protein, 225 aa, synthetic construct; identical to SEQ ID NO: 154

SEQ ID NO: 1162 - protein, 225 aa, synthetic construct; identical to SEQ ID NO: 154

SEQ ID NO: 1163 - protein, 225 aa, synthetic construct; identical to SEQ ID NO: 154

SEQ ID NO: 1164 - protein, 225 aa, synthetic construct; identical to SEQ ID NO: 154

SEQ ID NO: 1165 - protein, 225 aa, synthetic construct; identical to SEQ ID NO: 154

SEQ ID NO: 1166 - protein, 465 aa, synthetic construct
QVQLVQSGAEVKKPGSSVKVSCKASGYSFTLYYIHWVRQAPGQCLEWMGWFFPGSGNIKYNEKFKGRVTITADTSTSTAYMELSSLRSEDTAVYYCAASYYSFDVLDYWGQGTTVTVSSGGGGSGGGGSGGGGSDIQMTQSPSFLSASVGDRVTITCKASQNVGIRVVWHQQKPGKAPKALIYSSSHRYSGVPSRFSGSGSGTEFTLTISSLQPEDFATYFCQQFKSYPITFGCGTKLEIKGGGGSDIVMTQSPATLSLSPGERATLSCRSSKSLQNVNGNTYLYWFQQKPGQSPQLLIYRMSNLNSGVPDRFSGSGSGTEFTLTISSLEPEDFAVYYCMQHLEYPITFGAGTKLEIKRTVAAPSVFIFPPSDEQLKSGTASVVCLLNNFYPREAKVQWKVDNALQSGNSQESVTEQDSKDSTYSLSSTLTLSKADYEKHKVYACEVTHQGLSSPVTKSFNRGEC

SEQ ID NO: 1167 - protein, 465 aa, synthetic construct
QVQLVQSGAEVKKPGSSVKVSCKASGYSFTTYYIHWVRQAPGQCLEWMGWFFPRSGNIKYNEKFKGRVTITADTSTSTAYMELSSLRSEDTAVYYCAASYYSFDVLDYWGQGTTVTVSSGGGGSGGGGSGGGGSDIQMTQSPSFLSASVGDRVTITCKASQNVGIRVVWHQQKPGKAPKALIYSSSHRYSGVPSRFSGSGSGTEFTLTISSLQPEDFATYFCQQFKSYPITFGCGTKLEIKGGGGSDIVMTQSPATLSLSPGERATLSCRSSKSLQNVNGNTYLYWFQQKPGQSPQLLIYRMSNLNSGVPDRFSGSGSGTEFTLTISSLEPEDFAVYYCMQHLEYPITFGAGTKLEIKRTVAAPSVFIFPPSDEQLKSGTASVVCLLNNFYPREAKVQWKVDNALQSGNSQESVTEQDSKDSTYSLSSTLTLSKADYEKHKVYACEVTHQGLSSPVTKSFNRGEC

SEQ ID NO: 1168 - protein, 213 aa, synthetic construct; identical to SEQ ID NO: 406

SEQ ID NO: 1169 - protein, 213 aa, synthetic construct; identical to SEQ ID NO: 406

SEQ ID NO: 1170 - protein, 213 aa, synthetic construct; identical to SEQ ID NO: 406

SEQ ID NO: 1171 - protein, 465 aa, synthetic construct; identical to SEQ ID NO: 495

SEQ ID NO: 1172 - protein, 213 aa, synthetic construct; identical to SEQ ID NO: 406

SEQ ID NO: 1173 - protein, 449 aa, synthetic construct; identical to SEQ ID NO: 812

SEQ ID NO: 1174 - protein, 449 aa, synthetic construct; identical to SEQ ID NO: 812

SEQ ID NO: 1175 - protein, 694 aa, synthetic construct
QVQLVQSGAEVKKPGSSVKVSCKASGYSFTLYYIHWVRQAPGQCLEWMGWFFPGSGNIKYNEKFKGRVTITADTSTSTAYMELSSLRSEDTAVYYCAASYYSFDVLDYWGQGTTVTVSSGGGGSGGGGSGGGGSDIQMTQSPSFLSASVGDRVTITCKASQNVGIRVVWHQQKPGKAPKALIYSSSHRYSGVPSRFSGSGSGTEFTLTISSLQPEDFATYFCQQFKSYPITFGCGTKLEIKGGGGSQVQLQESGPGLVKPSQTLSLTCTVSGGSISTSTMGVGWIRQHPGKGLEWIGFIWWDDDKRYNPNLKSRVTMSVDTSKNQFSLKLSSVTAADTAVYYCARMELWSYYFDPWGQGTLVTVSSASTKGPSVFPLAPSSKSTSGGTAALGCLVKDYFPEPVTVSWNSGALTSGVHTFPAVLQSSGLYSLSSVVTVPSSSLGTQTYICNVNHKPSNTKVDKKVEPKSCDKTHTCPPCPAPEAAGGPSVFLFPPKPKDTLMISRTPEVTCVVVDVSHEDPEVKFNWYVDGVEVHNAKTKPREEQYGSTYRVVSVLTVLHQDWLNGKEYKCKVSNKALGAPIEKTISKAKGQPREPQVYTLPPCRDELTKNQVSLWCLVKGFYPSDIAVEWESNGQPENNYKTTPPVLDSDGSFFLYSKLTVDKSRWQQGNVFSCSVMHEALHNHYTQKSLSLSP

SEQ ID NO: 1176 - protein, 694 aa, synthetic construct
QVQLVQSGAEVKKPGSSVKVSCKASGYSFTTYYIHWVRQAPGQCLEWMGWFFPRSGNIKYNEKFKGRVTITADTSTSTAYMELSSLRSEDTAVYYCAASYYSFDVLDYWGQGTTVTVSSGGGGSGGGGSGGGGSDIQMTQSPSFLSASVGDRVTITCKASQNVGIRVVWHQQKPGKAPKALIYSSSHRYSGVPSRFSGSGSGTEFTLTISSLQPEDFATYFCQQFKSYPITFGCGTKLEIKGGGGSQVQLQESGPGLVKPSQTLSLTCTVSGGSISTSTMGVGWIRQHPGKGLEWIGFIWWDDDKRYNPNLKSRVTMSVDTSKNQFSLKLSSVTAADTAVYYCARMELWSYYFDPWGQGTLVTVSSASTKGPSVFPLAPSSKSTSGGTAALGCLVKDYFPEPVTVSWNSGALTSGVHTFPAVLQSSGLYSLSSVVTVPSSSLGTQTYICNVNHKPSNTKVDKKVEPKSCDKTHTCPPCPAPEAAGGPSVFLFPPKPKDTLMISRTPEVTCVVVDVSHEDPEVKFNWYVDGVEVHNAKTKPREEQYGSTYRVVSVLTVLHQDWLNGKEYKCKVSNKALGAPIEKTISKAKGQPREPQVYTLPPCRDELTKNQVSLWCLVKGFYPSDIAVEWESNGQPENNYKTTPPVLDSDGSFFLYSKLTVDKSRWQQGNVFSCSVMHEALHNHYTQKSLSLSP

SEQ ID NO: 1177 - protein, 694 aa, synthetic construct
QVQLVQSGAEVKKPGSSVKVSCKASGHDFRLTYIHWVRQAPGQCLEWMGRVSAGSGNVKYNEKFKGRVTITADTSTSTAYMELSSLRSEDTAVYYCAVSYYSYDVLDYWGQGTTVTVSSGGGGSGGGGSGGGGSDIQMTQSPSFLSASVGDRVTITCKASQNVADRVVWHQQKPGKAPKALIYSSSHRYKGVPSRFSGSGSGTEFTLTISSLQPEDFATYFCQQFKSYPLTFGCGTKLEIKGGGGSQVQLQESGPGLVKPSQTLSLTCTVSGGSISTSTMGVGWIRQHPGKGLEWIGFIWWDDDKRYNPNLKSRVTMSVDTSKNQFSLKLSSVTAADTAVYYCARMELWSYYFDPWGQGTLVTVSSASTKGPSVFPLAPSSKSTSGGTAALGCLVKDYFPEPVTVSWNSGALTSGVHTFPAVLQSSGLYSLSSVVTVPSSSLGTQTYICNVNHKPSNTKVDKKVEPKSCDKTHTCPPCPAPEAAGGPSVFLFPPKPKDTLMISRTPEVTCVVVDVSHEDPEVKFNWYVDGVEVHNAKTKPREEQYGSTYRVVSVLTVLHQDWLNGKEYKCKVSNKALGAPIEKTISKAKGQPREPQVYTLPPCRDELTKNQVSLWCLVKGFYPSDIAVEWESNGQPENNYKTTPPVLDSDGSFFLYSKLTVDKSRWQQGNVFSCSVMHEALHNHYTQKSLSLSP

SEQ ID NO: 1178 - protein, 449 aa, synthetic construct; identical to SEQ ID NO: 812

SEQ ID NO: 1179 - protein, 694 aa, synthetic construct; identical to SEQ ID NO: 985

SEQ ID NO: 1180 - protein, 17 aa, synthetic construct
WIFPGSGNIKYNEKFKG

SEQ ID NO: 1181 - protein, 17 aa, synthetic construct
WIYPGSGNIKYNEKFKG

SEQ ID NO: 1182 - protein, 11 aa, synthetic construct
KASQNVGNNVA

SEQ ID NO: 1183 - protein, 11 aa, synthetic construct
RASQNVGNNVA

SEQ ID NO: 1184 - protein, 8 aa, synthetic construct
IFPGSGNI

SEQ ID NO: 1185 - protein, 8 aa, synthetic construct
IYPGSGNI

SEQ ID NO: 1186 - protein, 12 aa, synthetic construct
ARSYYSYDVLDY

SEQ ID NO: 1187 - protein, 6 aa, synthetic construct
QNVGNN

SEQ ID NO: 1188-1189 - skipped (2 entries)

SEQ ID NO: 1190 - protein, 119 aa, synthetic construct
QVQLVQSGAEVKKPGSSVKVSCKASGYSFTLYYIHWVRQAPGQCLEWMGWFFPGSGNIKYNEKFKGRVTITADTSTSTAYMELSSLRSEDTAVYYCAASYYSFDVLDYWGQGTTVTVSS

SEQ ID NO: 1191 - protein, 119 aa, synthetic construct
QVQLVQSGAEVKKPGSSVKVSCKASGYSFTTYYIHWVRQAPGQCLEWMGWFFPRSGNIKYNEKFKGRVTITADTSTSTAYMELSSLRSEDTAVYYCAASYYSFDVLDYWGQGTTVTVSS

SEQ ID NO: 1192 - protein, 107 aa, synthetic construct
DIQMTQSPSFLSASVGDRVTITCKASQNVGIRVVWHQQKPGKAPKALIYSSSHRYSGVPSRFSGSGSGTEFTLTISSLQPEDFATYFCQQFKSYPITFGCGTKLEIK